(19) United States
(12) Patent Application Publication
(10) Pub. No.: US 2007/0059712 A1
(43) Pub. Date: Mar. 15, 2007

(54) Methods of diagnosis of prostate cancer, compositions and methods of screening for modulators of prostate cancer

(76) Inventors: Kurt C. Gish, Piedmont, CA (US); David H. Mack, Menlo Park, CA (US); Keith E. Wilson, Redwood City, CA (US); Peter Hevezi, San Francisco, CA (US)

Correspondence Address: FENWICK & WEST LLP, SILICON VALLEY CENTER, 801 CALIFORNIA STREET, MOUNTAIN VIEW, CA, 94041, US

(21) Appl. No.: 11/212,799

(22) Filed: Aug. 24, 2005

Related U.S. Application Data
(62) Division of application No. 09/976,858, filed on Oct. 12, 2001.
(63) Continuation-in-part of application No. 09/847,046, filed on Apr. 30, 2001, now abandoned.
Application No. 09/847,046 is a continuation-in-part of application No. 09/733,288, filed on Dec. 8, 2000, now abandoned.
Application No. 09/733,288 is a continuation-in-part of application No. 09/687,576, filed on Oct. 13, 2000, now abandoned.
Application No. 09/976,858 is a continuation-in-part of application No. 09/733,742, filed on Dec. 8, 2000, now abandoned.
Application No. 09/733,742 is a continuation-in-part of application No. 09/687,576, filed on Oct. 13, 2000, now abandoned.
(60) Provisional application No. 60/288,589, filed on May 4, 2001.
(60) Provisional application No. 60/286,214, filed on Apr. 24, 2001.
(60) Provisional application No. 60/281,922, filed on Apr. 6, 2001.
(60) Provisional application No. 60/276,791, filed on Mar. 16, 2001.
(60) Provisional application No. 60/276,888, filed on Mar. 16, 2001.
(60) Provisional application No. 60/263,957, filed on Jan. 24, 2001.

(51) Int. Cl. C12Q 1/68; C12P 19/34; C12M 1/34

(52) U.S. Cl. 435/6; 435/91.2; 435/287.2

(57) ABSTRACT

Described herein are genes whose expression are up-regulated or down-regulated in prostate cancer. Also described are such genes whose expression is further up-regulated or down-regulated in drug-resistant prostate cancer cells. Related methods and compositions that can be used for diagnosis and treatment of prostate cancer are disclosed. Also described herein are methods that can be used to identify modulators of prostate cancer.

### CROSS-REFERENCES TO RELATED APPLICATIONS

[0001] This application claims priority from the following applications: U.S. Ser. No. 09/687,576 filed Oct. 13, 2000, U.S. Ser. No. 60/276,791 filed Mar. 16, 2001; U.S. Ser. No. 60/288,589, filed May 4, 2001; U.S. Ser. No. 09/733,742, filed Dec. 8, 2000; U.S. Ser. No. 09/733,288, filed Dec. 8, 2000; U.S. Ser. No. 09/847,046, filed Apr. 30, 2001; U.S. Ser. No. 60/276,888, filed Mar. 16, 2001; U.S. Ser. No. 60/286,214, filed Apr. 24, 2001; U.S. Ser. No. 60/281,922, filed Apr. 6, 2001; U.S. Ser. No. 60/263,957, filed Jan. 24, 2001, which are incorporated herein by reference in their entirety.

### FIELD OF THE INVENTION

[0002] The invention relates to the identification of nucleic acid and protein expression profiles and nucleic acids, products, and antibodies thereto that are involved in prostate cancer; and to the use of such expression profiles and compositions in the diagnosis, prognosis and therapy of prostate cancer. The invention further relates to methods for identifying and using agents and/or targets that inhibit prostate cancer.

### BACKGROUND OF THE INVENTION

[0003] Prostate cancer is the most commonly diagnosed internal malignancy and second most common cause of cancer death in men in the U.S., resulting in approximately 40,000 deaths each year (Landis et al., CA Cancer J. Clin. 48:6-29 (1998); Greenlee et al., CA Cancer J. Clin. 50(1):7-13 (2000)), and incidence of prostate cancer has been increasing rapidly over the past 20 years in many parts of the world (Nakata et al., Int. J. Urol. 7(7):254-257 (2000); Majeed et al., BJU Int. 85(9):1058-1062 (2000)). It develops as the result of a pathologic transformation of normal prostate cells. In tumorigenesis, the cancer cell undergoes initiation, proliferation and loss of contact inhibition, culminating in invasion of surrounding tissue and, ultimately, metastasis.

[0004] Deaths from prostate cancer are a result of metastasis of a prostate tumor. Therefore, early detection of the development of prostate cancer is critical in reducing mortality from this disease. Measuring levels of prostate-specific antigen (PSA) has become a very common method for early detection and screening, and may have contributed to the slight decrease in the mortality rate from prostate cancer in recent years (Nowroozi et al., Cancer Control 5(6):522-531 (1998)). However, many cases are not diagnosed until the disease has progressed to an advanced stage.

[0005] Treatments such as surgery (prostatectomy), radiation therapy, and cryotherapy are potentially curative when the cancer remains localized to the prostate. Therefore, early detection of prostate cancer is important for a positive prognosis for treatment. Systemic treatment for metastatic prostate cancer is limited to hormone therapy and chemotherapy. Chemical or surgical castration has been the primary treatment for symptomatic metastatic prostate cancer for over 50 years. This testicular androgen deprivation therapy usually results in stabilization or regression of the disease (in 80% of patients), but progression of metastatic prostate cancer eventually develops (Panvichian et al., Cancer Control 3(6):493-500 (1996)). Metastatic disease is currently considered incurable, and the primary goals of treatment are to prolong survival and improve quality of life (Rago, Cancer Control 5(6):513-521 (1998)).

[0006] Thus, methods that can be used for diagnosis and prognosis of prostate cancer and effective treatment of prostate cancer, and including particularly metastatic prostate cancer, would be desirable. Accordingly, provided herein are methods that can be used in diagnosis and prognosis of prostate cancer. Further provided are methods that can be used to screen candidate bioactive agents for the ability to modulate, e.g., treat, prostate cancer. Additionally, provided herein are molecular targets and compositions for therapeutic intervention in prostate cancer and other cancers.

### SUMMARY OF THE INVENTION

[0007] The present invention therefore provides nucleotide sequences of genes that are up- and down-regulated in prostate cancer cells. Such genes are useful for diagnostic purposes, and also as targets for screening for therapeutic compounds that modulate prostate cancer, such as hormones or antibodies. Other aspects of the invention will become apparent to the skilled artisan by the following description of the invention.

[0008] In one aspect, the present invention provides a method of detecting a prostate cancer-associated transcript in a cell from a patient, the method comprising contacting a biological sample from the patient with a polynucleotide that selectively hybridizes to a sequence at least 80% identical to a sequence as shown in Tables 1-16.

[0009] In one embodiment, the present invention provides a method of determining the level of a prostate cancer associated transcript in a cell from a patient.

[0010] In one embodiment, the present invention provides a method of detecting a prostate cancer-associated transcript in a cell from a patient, the method comprising contacting a biological sample from the patient with a polynucleotide that selectively hybridizes to a sequence at least 80% identical to a sequence as shown in Tables 1-16.

[0011] In one embodiment, the polynucleotide selectively hybridizes to a sequence at least 95% identical to a sequence as shown in Tables 1-16. In another embodiment, the polynucleotide comprises a sequence as shown in Tables 1-16.

[0012] In one embodiment, the biological sample is a tissue sample. In another embodiment, the biological sample comprises isolated nucleic acids, e.g., mRNA.

[0013] In one embodiment, the polynucleotide is labeled, e.g., with a fluorescent label.

[0014] In one embodiment, the polynucleotide is immobilized on a solid surface.

[0015] In one embodiment, the patient is undergoing a therapeutic regimen to treat prostate cancer. In another embodiment, the patient is suspected of having metastatic prostate cancer.

[0016] In one embodiment, the patient is a human.

[0017] In one embodiment, the patient is suspected of having a taxol-resistant cancer.

[0018] In one embodiment, the prostate cancer associated transcript is mRNA.

[0019] In one embodiment, the method further comprises the step of amplifying nucleic acids before the step of contacting the biological sample with the polynucleotide.

[0020] In another aspect, the present invention provides a method of monitoring the efficacy of a therapeutic treatment of prostate cancer, the method comprising the steps of: (i) providing a biological sample from a patient undergoing the therapeutic treatment; and (ii) determining the level of a prostate cancer-associated transcript in the biological sample by contacting the biological sample with a polynucleotide that selectively hybridizes to a sequence at least 80% identical to a sequence as shown in Tables 1-16, thereby monitoring the efficacy of the therapy. In a further embodiment, the patient has metastatic prostate cancer. In a further embodiment, the patient has a drug resistant (e.g., taxol resistant) form of prostate cancer.

[0021] In one embodiment, the method further comprises the step of: (iii) comparing the level of the prostate cancer-associated transcript to a level of the prostate cancer-associated transcript in a biological sample from the patient prior to, or earlier in, the therapeutic treatment.

[0022] Additionally, provided herein is a method of evaluating the effect of a candidate prostate cancer drug comprising administering the drug to a patient and removing a cell sample from the patient. The expression profile of the cell is then determined. This method may further comprise comparing the expression profile to an expression profile of a healthy individual. In a preferred embodiment, said expression profile includes a gene of Tables 1-16.

[0023] In one aspect, the present invention provides an isolated nucleic acid molecule consisting of a polynucleotide sequence as shown in Tables 1-16.

[0024] In one embodiment, an expression vector or cell comprises the isolated nucleic acid.

[0025] In one aspect, the present invention provides an isolated polypeptide which is encoded by a nucleic acid molecule having polynucleotide sequence as shown in Tables 1-16.

[0026] In another aspect, the present invention provides an antibody that specifically binds to an isolated polypeptide which is encoded by a nucleic acid molecule having polynucleotide sequence as shown in Tables 1-16.

[0027] In one embodiment, the antibody is conjugated to an effector component, e.g., a fluorescent label, a radioisotope or a cytotoxic chemical.

[0028] In one embodiment, the antibody is an antibody fragment. In another embodiment, the antibody is humanized.

[0029] In one aspect, the present invention provides a method of detecting a prostate cancer cell in a biological sample from a patient, the method comprising contacting the biological sample with an antibody as described herein.

[0030] In another aspect, the present invention provides a method of detecting antibodies specific to prostate cancer in a patient, the method comprising contacting a biological sample from the patient with a polypeptide encoded by a nucleic acid comprising a sequence from Tables 1-16.

[0031] In another aspect, the present invention provides a method for identifying a compound that modulates a prostate cancer-associated polypeptide, the method comprising the steps of: (i) contacting the compound with a prostate cancer-associated polypeptide, the polypeptide encoded by a polynucleotide that selectively hybridizes to a sequence at least 80% identical to a sequence as shown in Tables 1-16; and (ii) determining the functional effect of the compound upon the polypeptide.

[0032] In one embodiment, the functional effect is a physical effect, an enzymatic effect, or a chemical effect.

[0033] In one embodiment, the polypeptide is expressed in a eukaryotic host cell or cell membrane. In another embodiment, the polypeptide is recombinant.

[0034] In one embodiment, the functional effect is determined by measuring ligand binding to the polypeptide.

[0035] In another aspect, the present invention provides a method of inhibiting proliferation of a prostate cancer-associated cell to treat prostate cancer in a patient, the method comprising the step of administering to the subject a therapeutically effective amount of a compound identified as described herein.

[0036] In one embodiment, the compound is an antibody.

[0037] In another aspect, the present invention provides a drug screening assay comprising the steps of: (i) administering a test compound to a mammal having prostate cancer or to a cell sample isolated therefrom; (ii) comparing the level of gene expression of a polynucleotide that selectively hybridizes to a sequence at least 80% identical to a sequence as shown in Tables 1-16 in a treated cell or mammal with the level of gene expression of the polynucleotide in a control cell sample or mammal, wherein a test compound that modulates the level of expression of the polynucleotide is a candidate for the treatment of prostate cancer.

[0038] In one embodiment, the control is a mammal with prostate cancer or a cell sample therefrom that has not been treated with the test compound. In another embodiment, the control is a normal cell or mammal.

[0039] In one embodiment, the test compound is administered in varying amounts or concentrations. In another embodiment, the test compound is administered for varying time periods. In another embodiment, the comparison can occur after addition or removal of the drug candidate.

[0040] In one embodiment, the levels of a plurality of polynucleotides that selectively hybridize to a sequence at least 80% identical to a sequence as shown in Tables 1-16 are individually compared to their respective levels in a control cell sample or mammal. In a preferred embodiment the plurality of polynucleotides is from three to ten.

[0041] In another aspect, the present invention provides a method for treating a mammal having prostate cancer comprising administering a compound identified by the assay described herein.

[0042] In another aspect, the present invention provides a pharmaceutical composition for treating a mammal having prostate cancer, the composition comprising a compound identified by the assay described herein and a physiologically acceptable excipient.

[0043] In one aspect, the present invention provides a method of screening drug candidates by providing a cell expressing a gene that is up- and down-regulated as in a prostate cancer. In one embodiment, a gene is selected from Tables 1-16. The method further includes adding a drug candidate to the cell and determining the effect of the drug candidate on the expression of the expression profile gene.

[0044] In one embodiment, the method of screening drug candidates includes comparing the level of expression in the absence of the drug candidate to the level of expression in the presence of the drug candidate, wherein the concentration of the drug candidate can vary when present, and wherein the comparison can occur after addition or removal of the drug candidate. In a preferred embodiment, the cell expresses at least two expression profile genes. The profile genes may show an increase or decrease.

[0045] Also provided is a method of evaluating the effect of a candidate prostate cancer drug comprising administering the drug to a transgenic animal expressing or over-expressing the prostate cancer modulatory protein, or an animal lacking the prostate cancer modulatory protein, for example as a result of a gene knockout.

[0046] Moreover, provided herein is a biochip comprising one or more nucleic acid segments of Tables 1-16, wherein the biochip comprises fewer than 1000 nucleic acid probes. Preferably, at least two nucleic acid segments are included. More preferably, at least three nucleic acid segments are included.

[0047] Furthermore, a method of diagnosing a disorder associated with prostate cancer is provided. The method comprises determining the expression of a gene of Tables 1-16, in a first tissue type of a first individual, and comparing the distribution to the expression of the gene from a second normal tissue type from the first individual or a second unaffected individual. A difference in the expression indicates that the first individual has a disorder associated with prostate cancer.

[0048] In a further embodiment, the biochip also includes a polynucleotide sequence of a gene that is not up- and down-regulated in prostate cancer.

[0049] In one embodiment a method for screening for a bioactive agent capable of interfering with the binding of a prostate cancer modulating protein (prostate cancer modulatory protein) or a fragment thereof and an antibody which binds to said prostate cancer modulatory protein or fragment thereof. In a preferred embodiment, the method comprises combining a prostate cancer modulatory protein or fragment thereof, a candidate bioactive agent and an antibody which binds to said prostate cancer modulatory protein or fragment thereof. The method further includes determining the binding of said prostate cancer modulatory protein or fragment thereof and said antibody. Wherein there is a change in binding, an agent is identified as an interfering agent. The interfering agent can be an agonist or an antagonist. Preferably, the agent inhibits prostate cancer.

[0050] Also provided herein are methods of eliciting an immune response in an individual. In one embodiment a method provided herein comprises administering to an individual a composition comprising a prostate cancer modulating protein, or a fragment thereof. In another embodiment, the protein is encoded by a nucleic acid selected from those of Tables 1-16.

[0051] Further provided herein are compositions capable of eliciting an immune response in an individual. In one embodiment, a composition provided herein comprises a prostate cancer modulating protein, preferably encoded by a nucleic acid of Tables 1-16, or a fragment thereof, and a pharmaceutically acceptable carrier. In another embodiment, said composition comprises a nucleic acid comprising a sequence encoding a prostate cancer modulating protein, preferably selected from the nucleic acids of Tables 1-16, and a pharmaceutically acceptable carrier.

[0052] Also provided are methods of neutralizing the effect of a prostate cancer protein, or a fragment thereof, comprising contacting an agent specific for said protein with said protein in an amount sufficient to effect neutralization. In another embodiment, the protein is encoded by a nucleic acid selected from those of Tables 1-16.

[0053] In another aspect of the invention, a method of treating an individual for prostate cancer is provided. In one embodiment, the method comprises administering to said individual an inhibitor of a prostate cancer modulating protein. In another embodiment, the method comprises administering to a patient having prostate cancer an antibody to a prostate cancer modulating protein conjugated to a therapeutic moiety. Such a therapeutic moiety can be a cytotoxic agent or a radioisotope.

### DETAILED DESCRIPTION OF THE INVENTION

[0054] In accordance with the objects outlined above, the present invention provides novel methods for diagnosis and prognosis evaluation for prostate cancer (PC), including metastatic prostate cancer, as well as methods for screening for compositions which modulate prostate cancer. Also provided are methods for treating prostate cancer.

[0055] In addition to the other nucleic acid and peptide sequences, the present invention also relates to the identification of PAA2 as a gene that is highly over expressed in prostate cancer patient tissues. PAA2 sequence is identical to the zinc transporter ZNT4. Results presented herein demonstrate that PAA2/ZNT4 is highly expressed in prostate cancer cells. The prostate gland is unique in that it has the highest capacity of any organ in the body to accumulate zinc. Zinc uptake is regulated by prolactin and testosterone, which induce the expression of a member of the ZIP family of zinc transporters (Costello et al., 1999, J. Biol. Chem. 274:17499-17504). Zinc accumulation in the prostate functions to inhibit citrate oxidation, which results in a decrease in cellular ATP production (Costello and Franklin, 1998, Prostate 35:285-296). Cancer cells are more sensitive to decreased ATP production and have evolved to prevent zinc accumulation. Without wishing to be bound by theory, the up-regulation of ZNT4 in prostate cancer cells may result in protection of the cells from high zinc levels by its ability to pump accumulated zinc out of the cells.

[0056] The present invention also relates to nucleic acid sequencess encoding PBH1. PBH1 is related to human TRPC7 (transient receptor potential-related channels, NP_{—}003298), a putative calcium channel highly expressed in brain (Nagamine et al., Genomics 54:124-131 (1998)). Trp is related to melastatin, a gene down-regulated in metastatic melanomas (Duncan et al., Cancer Res. 58:1515-1520 (1998)), and MTR1, a gene locallized to within the Beckwith-Wiedemann syndrome/Wilm's tumor susceptability region (Prawitt et al., Hum. Mol. Genet. 9:203-216 (2000)). Without wishing to be bound by theory, it is believed that PBH1 functions as a calcium channel.

[0057] As a calcium channel, PBH1 is an ideal target for a small molecule therapeutic, or a therapeutic antibody that disrupts channel function. CD20, the target of Rituximab in non-Hodgekin's lymphoma (Maloney et al., Blood 90:2188-2195 (1997); Leget and Czuczman, Curr. Opin. Oncol. 10:548-551 (1998)), is a plasma membrane calcium channel expressed in B cells (Tedder and Engel, Immunol. Today 15:450-454 (1994)). Similarly, a small molecule, or antibody that inhibits or alters a calcium signal mediated by PBH1, will result in the death of prostate cancer cells.

[0058] PBH1, and other genes of the invention, are also be useful as targets for cytotoxic T-lymphocytes. Genes that are tumor specific, or that are expressed in immune-privileged organs, are currently being used as potential vaccine targets (Van den Eynde and Boon, Int. J. Clin. Lab. Res. 27:81-86 (1997)). The expression pattern of PBH1 indicates that it is an ideal target for cytotoxic T-lymphocytes. Thus, therapies that utilize PBH1-specific cytotoxic T-lymphocytes to induce prostate cancer cell death are also provided by this invention. See, e.g., U.S. Pat. No. 6,051,227 and WO 00/32231, the disclosures of which are herein incorporated by reference.

[0059] The present invention is also related to the identification of PAA3 as a gene that is important in the modulation of prostate cancer and or breast cancer.

[0060] Tables 1-16 provide unigene cluster identification numbers, exemplar accession numbers, or genomic nucleotide position numbers for the nucleotide sequence of genes that exhibit increased or decreased expression in prostate cancer samples.

Definitions

[0061] The term “prostate cancer protein” or “prostate cancer polynucleotide” or “prostate cancer-associated transcript” refers to nucleic acid and polypeptide polymorphic variants, alleles, mutants, and interspecies homologues that: (1) have a nucleotide sequence that has greater than about 60% nucleotide sequence identity, 65%, 70%, 75%, 80%, 85%, 90%, preferably 91%, 92%, 93%, 94%, 95%, 96%, 97%, 98% or 99% or greater nucleotide sequence identity, preferably over a region of over a region of at least about 25, 50, 100, 200, 500, 1000, or more nucleotides, to a nucleotide sequence of or associated with a unigene cluster of Tables 1-16; (2) bind to antibodies, e.g., polyclonal antibodies, raised against an immunogen comprising an amino acid sequence encoded by a nucleotide sequence of or associated with a unigene cluster of Tables 1-16, and conservatively modified variants thereof; (3) specifically hybridize under stringent hybridization conditions to a nucleic acid sequence, or the complement thereof of Tables 1-16 and conservatively modified variants thereof or (4) have an amino acid sequence that has greater than about 60% amino acid sequence identity, 65%, 70%, 75%, 80%, 85%, 90%, preferably 91%, 92%, 93%, 94%, 95%, 96%, 97%, 98% or 99% or greater amino sequence identity, preferably over a region of over a region of at least about 25, 50, 100, 200, 500, 1000, or more amino acid, to an amino acid sequence encoded by a nucleotide sequence of or associated with a unigene cluster of Tables 1-16. A polynucleotide or polypeptide sequence is typically from a mammal including, but not limited to, primate, e.g., human; rodent, e.g., rat, mouse, hamster; cow, pig, horse, sheep, or other mammal. A “prostate cancer polypeptide” and a “prostate cancer polynucleotide,” include both naturally occurring or recombinant forms.

[0062] A “full length” prostate cancer protein or nucleic acid refers to a prostate cancer polypeptide or polynucleotide sequence, or a variant thereof, that contains all of the elements normally contained in one or more naturally occurring, wild type prostate cancer polynucleotide or polypeptide sequences. For example, a full length prostate cancer nucleic acid will typically comprise all of the exons that encode for the full length, naturally occurring protein. The “full length” may be prior to, or after, various stages of post-translation processing or splicing, including alternative splicing.

[0063] “Biological sample” as used herein is a sample of biological tissue or fluid that contains nucleic acids or polypeptides, e.g., of a prostate cancer protein, polynucleotide or transcript. Such samples include, but are not limited to, tissue isolated from primates, e.g., humans, or rodents, e.g., mice, and rats. Biological samples may also include sections of tissues such as biopsy and autopsy samples, frozen sections taken for histologic purposes, blood, plasma, serum, sputum, stool, tears, mucus, hair, skin, etc. Biological samples also include explants and primary and/or transformed cell cultures derived from patient tissues. A biological sample is typically obtained from a eukaryotic organism, most preferably a mammal such as a primate e.g., chimpanzee or human; cow; dog; cat; a rodent, e.g., guinea pig, rat, mouse; rabbit; or a bird; reptile; or fish.

[0064] “Providing a biological sample” means to obtain a biological sample for use in methods described in this invention. Most often, this will be done by removing a sample of cells from an animal, but can also be accomplished by using previously isolated cells (e.g., isolated by another person, at another time, and/or for another purpose), or by performing the methods of the invention in vivo. Archival tissues, having treatment or outcome history, will be particularly useful.

[0065] The terms “identical” or percent “identity,” in the context of two or more nucleic acids or polypeptide sequences, refer to two or more sequences or subsequences that are the same or have a specified percentage of amino acid residues or nucleotides that are the same (i.e., about 60% identity, preferably 70%, 75%, 80%, 85%, 90%, 91%, 92%, 93%, 94%, 95%, 96%, 97%, 98%, 99%, or higher identity over a specified region, when compared and aligned for maximum correspondence over a comparison window or designated region) as measured using a BLAST or BLAST 2.0 sequence comparison algorithms with default parameters described below, or by manual alignment and visual inspection (see, e.g., NCBI web site http://www.ncbi.nlm.nih.gov/BLAST/ or the like). Such sequences are then said to be “substantially identical.” This definition also refers to, or may be applied to, the compliment of a test sequence. The definition also includes sequences that have deletions and/or additions, as well as those that have substitutions, as well as naturally occurring, e.g., polymorphic or allelic variants, and man-made variants. As described below, the preferred algorithms can account for gaps and the like. Preferably, identity exists over a region that is at least about 25 amino acids or nucleotides in length, or more preferably over a region that is 50-100 amino acids or nucleotides in length.

[0066] For sequence comparison, typically one sequence acts as a reference sequence, to which test sequences are compared. When using a sequence comparison algorithm, test and reference sequences are entered into a computer, subsequence coordinates are designated, if necessary, and sequence algorithm program parameters are designated. Preferably, default program parameters can be used, or alternative parameters can be designated. The sequence comparison algorithm then calculates the percent sequence identities for the test sequences relative to the reference sequence, based on the program parameters.

[0067] A “comparison window”, as used herein, includes reference to a segment of one of the number of contiguous positions selected from the group consisting typically of from 20 to 600, usually about 50 to about 200, more usually about 100 to about 150 in which a sequence may be compared to a reference sequence of the same number of contiguous positions after the two sequences are optimally aligned. Methods of alignment of sequences for comparison are well-known in the art. Optimal alignment of sequences for comparison can be conducted, e.g., by the local homology algorithm of Smith & Waterman, Adv. Appl. Math. 2:482 (1981), by the homology alignment algorithm of Needleman & Wunsch, J. Mol. Biol. 48:443 (1970), by the search for similarity method of Pearson & Lipman, Proc. Nat'l. Acad. Sci. USA 85:2444 (1988), by computerized implementations of these algorithms (GAP, BESTFIT, FASTA, and TFASTA in the Wisconsin Genetics Software Package, Genetics Computer Group, 575 Science Dr., Madison, Wis.), or by manual alignment and visual inspection (see, e.g., Current Protocols in Molecular Biology (Ausubel et al., eds. 1995 supplement)).

[0068] Preferred examples of algorithms that are suitable for determining percent sequence identity and sequence similarity include the BLAST and BLAST 2.0 algorithms, which are described in Altschul et al., Nuc. Acids Res. 25:3389-3402 (1977) and Altschul et al., J. Mol. Biol. 215:403-410 (1990). BLAST and BLAST 2.0 are used, with the parameters described herein, to determine percent sequence identity for the nucleic acids and proteins of the invention. Software for performing BLAST analyses is publicly available through the National Center for Biotechnology Information (http://www.ncbi.nlm.nih.gov/). This algorithm involves first identifying high scoring sequence pairs (HSPs) by identifying short words of length W in the query sequence, which either match or satisfy some positive-valued threshold score T when aligned with a word of the same length in a database sequence. T is referred to as the neighborhood word score threshold (Altschul et al., supra). These initial neighborhood word hits act as seeds for initiating searches to find longer HSPs containing them. The word hits are extended in both directions along each sequence for as far as the cumulative alignment score can be increased. Cumulative scores are calculated using, e.g., for nucleotide sequences, the parameters M (reward score for a pair of matching residues; always >0) and N (penalty score for mismatching residues; always <0). For amino acid sequences, a scoring matrix is used to calculate the cumulative score. Extension of the word hits in each direction are halted when: the cumulative alignment score falls off by the quantity X from its maximum achieved value; the cumulative score goes to zero or below, due to the accumulation of one or more negative-scoring residue alignments; or the end of either sequence is reached. The BLAST algorithm parameters W, T, and X determine the sensitivity and speed of the alignment. The BLASTN program (for nucleotide sequences) uses as defaults a wordlength (W) of 11, an expectation (E) of 10, M=5, N=−4 and a comparison of both strands. For amino acid sequences, the BLASTP program uses as defaults a wordlength of 3, and expectation (E) of 10, and the BLOSUM62 scoring matrix (see Henikoff & Henikoff, Proc. Natl. Acad. Sci. USA 89:10915 (1989)) alignments (B) of 50, expectation (E) of 10, M=5, N=−4, and a comparison of both strands.

[0069] The BLAST algorithm also performs a statistical analysis of the similarity between two sequences (see, e.g., Karlin & Altschul, Proc. Nat'l. Acad. Sci. USA 90:5873-5787 (1993)). One measure of similarity provided by the BLAST algorithm is the smallest sum probability (P(N)), which provides an indication of the probability by which a match between two nucleotide or amino acid sequences would occur by chance. For example, a nucleic acid is considered similar to a reference sequence if the smallest sum probability in a comparison of the test nucleic acid to the reference nucleic acid is less than about 0.2, more preferably less than about 0.01, and most preferably less than about 0.001. Log values may be large negative numbers, e.g., 5, 10, 20, 30, 40, 40, 70, 90, 110, 150, 170, etc.

[0070] An indication that two nucleic acid sequences or polypeptides are substantially identical is that the polypeptide encoded by the first nucleic acid is immunologically cross reactive with the antibodies raised against the polypeptide encoded by the second nucleic acid, as described below. Thus, a polypeptide is typically substantially identical to a second polypeptide, e.g., where the two peptides differ only by conservative substitutions. Another indication that two nucleic acid sequences are substantially identical is that the two molecules or their complements hybridize to each other under stringent conditions, as described below. Yet another indication that two nucleic acid sequences are substantially identical is that the same primers can be used to amplify the sequences.

[0071] A “host cell” is a naturally occurring cell or a transformed cell that contains an expression vector and supports the replication or expression of the expression vector. Host cells may be cultured cells, explants, cells in vivo, and the like. Host cells may be prokaryotic cells such as E. coli, or eukaryotic cells such as yeast, insect, amphibian, or mammalian cells such as CHO, HeLa, and the like (see, e.g., the American Type Culture Collection catalog or web site, www.atcc.org).

[0072] The terms “isolated,” “purified,” or “biologically pure” refer to material that is substantially or essentially free from components that normally accompany it as found in its native state. Purity and homogeneity are typically determined using analytical chemistry techniques such as polyacrylamide gel electrophoresis or high performance liquid chromatography. A protein or nucleic acid that is the predominant species present in a preparation is substantially purified. In particular, an isolated nucleic acid is separated from some open reading frames that naturally flank the gene and encode proteins other than protein encoded by the gene. The term “purified” in some embodiments denotes that a nucleic acid or protein gives rise to essentially one band in an electrophoretic gel. Preferably, it means that the nucleic acid or protein is at least 85% pure, more preferably at least 95% pure, and most preferably at least 99% pure. “Purify” or “purification” in other embodiments means removing at least one contaminant from the composition to be purified. In this sense, purification does not require that the purified compound be homogenous, e.g., 100% pure.

[0073] The terms “polypeptide,” “peptide” and “protein” are used interchangeably herein to refer to a polymer of amino acid residues. The terms apply to amino acid polymers in which one or more amino acid residue is an artificial chemical mimetic of a corresponding naturally occurring amino acid, as well as to naturally occurring amino acid polymers, those containing modified residues, and non-naturally occurring amino acid polymer.

[0074] The term “amino acid” refers to naturally occurring and synthetic amino acids, as well as amino acid analogs and amino acid mimetics that function similarly to the naturally occurring amino acids. Naturally occurring amino acids are those encoded by the genetic code, as well as those amino acids that are later modified, e.g., hydroxyproline, γ-carboxyglutamate, and O-phosphoserine. Amino acid analogs refers to compounds that have the same basic chemical structure as a naturally occurring amino acid, e.g., an α carbon that is bound to a hydrogen, a carboxyl group, an amino group, and an R group, e.g., homoserine, norleucine, methionine sulfoxide, methionine methyl sulfonium. Such analogs may have modified R groups (e.g., norleucine) or modified peptide backbones, but retain the same basic chemical structure as a naturally occurring amino acid. Amino acid mimetics refers to chemical compounds that have a structure that is different from the general chemical structure of an amino acid, but that functions similarly to a naturally occurring amino acid.

[0075] Amino acids may be referred to herein by either their commonly known three letter symbols or by the one-letter symbols recommended by the IUPAC-IUB Biochemical Nomenclature Commission. Nucleotides, likewise, may be referred to by their commonly accepted single-letter codes.

[0076] “Conservatively modified variants” applies to both amino acid and nucleic acid sequences. With respect to particular nucleic acid sequences, conservatively modified variants refers to those nucleic acids which encode identical or essentially identical amino acid sequences, or where the nucleic acid does not encode an amino acid sequence, to essentially identical or associated, e.g., naturally contiguous, sequences. Because of the degeneracy of the genetic code, a large number of functionally identical nucleic acids encode most proteins. For instance, the codons GCA, GCC, GCG and GCU all encode the amino acid alanine. Thus, at every position where an alanine is specified by a codon, the codon can be altered to another of the corresponding codons described without altering the encoded polypeptide. Such nucleic acid variations are “silent variations,” which are one species of conservatively modified variations. Every nucleic acid sequence herein which encodes a polypeptide also describes silent variations of the nucleic acid. One of skill will recognize that in certain contexts each codon in a nucleic acid (except AUG, which is ordinarily the only codon for methionine, and TGG, which is ordinarily the only codon for tryptophan) can be modified to yield a functionally identical molecule. Accordingly, often silent variations of a nucleic acid which encodes a polypeptide is implicit in a described sequence with respect to the expression product, but not with respect to actual probe sequences.

[0077] As to amino acid sequences, one of skill will recognize that individual substitutions, deletions or additions to a nucleic acid, peptide, polypeptide, or protein sequence which alters, adds or deletes a single amino acid or a small percentage of amino acids in the encoded sequence is a “conservatively modified variant” where the alteration results in the substitution of an amino acid with a chemically similar amino acid. Conservative substitution tables providing functionally similar amino acids are well known in the art. Such conservatively modified variants are in addition to and do not exclude polymorphic variants, interspecies homologs, and alleles of the invention typically conservative substitutions for one another: 1) Alanine (A), Glycine (G); 2) Aspartic acid (D), Glutamic acid (E); 3) Asparagine (N), Glutamine (Q); 4) Arginine (R), Lysine (K); 5) Isoleucine (I), Leucine (L), Methionine (M), Valine (V); 6) Phenylalanine (F), Tyrosine (Y), Tryptophan (W); 7) Serine (S), Threonine (T); and 8) Cysteine (C), Methionine (M) (see, e.g., Creighton, Proteins (1984)).

[0078] Macromolecular structures such as polypeptide structures can be described in terms of various levels of organization. For a general discussion of this organization, see, e.g., Alberts et al., Molecular Biology of the Cell (3^{rd} ed., 1994) and Cantor & Schimmel, Biophysical Chemistry Part I: The Conformation of Biological Macromolecules (1980). “Primary structure” refers to the amino acid sequence of a particular peptide. “Secondary structure” refers to locally ordered, three dimensional structures within a polypeptide. These structures are commonly known as domains. Domains are portions of a polypeptide that often form a compact unit of the polypeptide and are typically 25 to approximately 500 amino acids long. Typical domains are made up of sections of lesser organization such as stretches of β-sheet and α-helices. “Tertiary structure” refers to the complete three dimensional structure of a polypeptide monomer. “Quaternary structure” refers to the three dimensional structure formed, usually by the noncovalent association of independent tertiary units. Anisotropic terms are also known as energy terms.

[0079] “Nucleic acid” or “oligonucleotide” or “polynucleotide” or grammatical equivalents used herein means at least two nucleotides covalently linked together. Oligonucleotides are typically from about 5, 6, 7, 8, 9, 10, 12, 15, 25, 30, 40, 50 or more nucleotides in length, up to about 100 nucleotides in length. Nucleic acids and polynucleotides are a polymers of any length, including longer lengths, e.g., 200, 300, 500, 1000, 2000, 3000, 5000, 7000, 10,000, etc. A nucleic acid of the present invention will generally contain phosphodiester bonds, although in some cases, nucleic acid analogs are included that may have alternate backbones, comprising, e.g., phosphoramidate, phosphorothioate, phosphorodithioate, or O-methylphophoroamidite linkages (see Eckstein, Oligonucleotides and Analogues: A Practical Approach, Oxford University Press); and peptide nucleic acid backbones and linkages. Other analog nucleic acids include those with positive backbones; non-ionic backbones, and non-ribose backbones, including those described in U.S. Pat. Nos. 5,235,033 and 5,034,506, and Chapters 6 and 7, ASC Symposium Series 580, Carbohydrate Modifications in Antisense Research, Sanghui & Cook, eds. Nucleic acids containing one or more carbocyclic sugars are also included within one definition of nucleic acids. Modifications of the ribose-phosphate backbone may be done for a variety of reasons, e.g. to increase the stability and half-life of such molecules in physiological environments or as probes on a biochip. Mixtures of naturally occurring nucleic acids and analogs can be made; alternatively, mixtures of different nucleic acid analogs, and mixtures of naturally occurring nucleic acids and analogs may be made.

[0080] A variety of references disclose such nucleic acid analogs, including, for example, phosphoramidate (Beaucage et al., Tetrahedron 49(10):1925 (1993) and references therein; Letsinger, J. Org. Chem. 35:3800 (1970); Sprinzl et al., Eur. J. Biochem. 81:579 (1977); Letsinger et al., Nucl. Acids Res. 14:3487 (1986); Sawai et al, Chem. Lett. 805 (1984), Letsinger et al., J. Am. Chem. Soc. 110:4470 (1988); and Pauwels et al., Chemica Scripta 26:141 91986)), phosphorothioate (Mag et al., Nucleic Acids Res. 19:1437 (1991); and U.S. Pat. No. 5,644,048), phosphorodithioate (Briu et al., J. Am. Chem. Soc. 111:2321 (1989), O-methylphophoroamidite linkages (see Eckstein, Oligonucleotides and Analogues: A Practical Approach, Oxford University Press), and peptide nucleic acid backbones and linkages (see Egholm, J. Am. Chem. Soc. 114:1895 (1992); Meier et al., Chem. Int. Ed. Engl. 31:1008 (1992); Nielsen, Nature, 365:566 (1993); Carlsson et al., Nature 380:207 (1996), all of which are incorporated by reference). Other analog nucleic acids include those with positive backbones (Denpcy et al., Proc. Natl. Acad. Sci. USA 92:6097 (1995); non-ionic backbones (U.S. Pat. Nos. 5,386,023, 5,637,684, 5,602,240, 5,216,141 and 4,469,863; Kiedrowshi et al., Angew. Chem. Intl. Ed. English 30:423 (1991); Letsinger et al., J. Am. Chem. Soc. 110:4470 (1988); Letsinger et al., Nucleoside & Nucleotide 13:1597 (1994); Chapters 2 and 3, ASC Symposium Series 580, “Carbohydrate Modifications in Antisense Research”, Ed. Y. S. Sanghui and P. Dan Cook; Mesmaeker et al., Bioorganic & Medicinal Chem. Lett. 4:395 (1994); Jeffs et al., J. Biomolecular NMR 34:17 (1994); Tetrahedron Lett. 37:743 (1996)) and non-ribose backbones, including those described in U.S. Pat. Nos. 5,235,033 and 5,034,506, and Chapters 6 and 7, ASC Symposium Series 580, “Carbohydrate Modifications in Antisense Research”, Ed. Y. S. Sanghui and P. Dan Cook. Nucleic acids containing one or more carbocyclic sugars are also included within one definition of nucleic acids (see Jenkins et al., Chem. Soc. Rev. (1995) pp 169-176). Several nucleic acid analogs are described in Rawls, C & E News Jun. 2, 1997 page 35. All of these references are hereby expressly incorporated by reference.

[0081] Particularly preferred are peptide nucleic acids (PNA) which includes peptide nucleic acid analogs. These backbones are substantially non-ionic under neutral conditions, in contrast to the highly charged phosphodiester backbone of naturally occurring nucleic acids. This results in two advantages. First, the PNA backbone exhibits improved hybridization kinetics. PNAs have larger changes in the melting temperature (Tₘ) for mismatched versus perfectly matched basepairs. DNA and RNA typically exhibit a 2-4° C. drop in Tₘ for an internal mismatch. With the non-ionic PNA backbone, the drop is closer to 7-9° C. Similarly, due to their non-ionic nature, hybridization of the bases attached to these backbones is relatively insensitive to salt concentration. In addition, PNAs are not degraded by cellular enzymes, and thus can be more stable.

[0082] The nucleic acids may be single stranded or double stranded, as specified, or contain portions of both double stranded or single stranded sequence. As will be appreciated by those in the art, the depiction of a single strand also defines the sequence of the complementary strand; thus the sequences described herein also provide the complement of the sequence. The nucleic acid may be DNA, both genomic and cDNA, RNA or a hybrid, where the nucleic acid may contain combinations of deoxyribo- and ribo-nucleotides, and combinations of bases, including uracil, adenine, thymine, cytosine, guanine, inosine, xanthine hypoxanthine, isocytosine, isoguanine, etc. “Transcript” typically refers to a naturally occurring RNA, e.g., a pre-mRNA, hnRNA, or mRNA. As used herein, the term “nucleoside” includes nucleotides and nucleoside and nucleotide analogs, and modified nucleosides such as amino modified nucleosides. In addition, “nucleoside” includes non-naturally occurring analog structures. Thus, e.g. the individual units of a peptide nucleic acid, each containing a base, are referred to herein as a nucleoside.

[0083] A “label” or a “detectable moiety” is a composition detectable by spectroscopic, photochemical, biochemical, immunochemical, chemical, or other physical means. For example, useful labels include fluorescent dyes, electron-dense reagents, enzymes (e.g., as commonly used in an ELISA), biotin, digoxigenin, or haptens and proteins or other entities which can be made detectable, e.g., by incorporating a radiolabel into the peptide or used to detect antibodies specifically reactive with the peptide. The radioisotope may be, for example, 3H, 14C, 32P, 35S, or 125I. In some cases, particularly using antibodies against the proteins of the invention, the radioisotopes are used as toxic moieties, as described below. The labels may be incorporated into the prostate cancer nucleic acids, proteins and antibodies at any position. Any method known in the art for conjugating the antibody to the label may be employed, including those methods described by Hunter et al., Nature, 144:945 (1962); David et al., Biochemistry, 13:1014 (1974); Pain et al., J. Immunol. Meth., 40:219 (1981); and Nygren, J. Histochem. and Cytochem., 30:407 (1982). The lifetime of radiolabeled peptides or radiolabeled antibody compositions may extended by the addition of substances that stablize the radiolabeled peptide or antibody and protect it from degradation. Any substance or combination of substances that stablize the radiolabeled peptide or antibody may be used including those substances disclosed in U.S. Pat. No. 5,961,955.

[0084] An “effector” or “effector moiety” or “effector component” is a molecule that is bound (or linked, or conjugated), either covalently, through a linker or a chemical bond, or noncovalently, through ionic, van der Waals, electrostatic, or hydrogen bonds, to an antibody. The “effector” can be a variety of molecules including, e.g., detection moieties including radioactive compounds, fluorescent compounds, an enzyme or substrate, tags such as epitope tags, a toxin; activatable moieties, a chemotherapeutic agent; a lipase; an antibiotic; or a radioisotope emitting “hard” e.g., beta radiation.

[0085] A “labeled nucleic acid probe or oligonucleotide” is one that is bound, either covalently, through a linker or a chemical bond, or noncovalently, through ionic, van der Waals, electrostatic, or hydrogen bonds to a label such that the presence of the probe may be detected by detecting the presence of the label bound to the probe. Alternatively, method using high affinity interactions may achieve the same results where one of a pair of binding partners binds to the other, e.g., biotin, streptavidin.

[0086] As used herein a “nucleic acid probe or oligonucleotide” is defined as a nucleic acid capable of binding to a target nucleic acid of complementary sequence through one or more types of chemical bonds, usually through complementary base pairing, usually through hydrogen bond formation. As used herein, a probe may include natural (i.e., A, G, C, or T) or modified bases (7-deazaguanosine, inosine, etc.). In addition, the bases in a probe may be joined by a linkage other than a phosphodiester bond, so long as it does not functionally interfere with hybridization. Thus, e.g., probes may be peptide nucleic acids in which the constituent bases are joined by peptide bonds rather than phosphodiester linkages. It will be understood by one of skill in the art that probes may bind target sequences lacking complete complementarity with the probe sequence depending upon the stringency of the hybridization conditions. The probes are preferably directly labeled as with isotopes, chromophores, lumiphores, chromogens, or indirectly labeled such as with biotin to which a streptavidin complex may later bind. By assaying for the presence or absence of the probe, one can detect the presence or absence of the select sequence or subsequence. Diagnosis or prognosis may be based at the genomic level, or at the level of RNA or protein expression.

[0087] The term “recombinant” when used with reference, e.g., to a cell, or nucleic acid, protein, or vector, indicates that the cell, nucleic acid, protein or vector, has been modified by the introduction of a heterologous nucleic acid or protein or the alteration of a native nucleic acid or protein, or that the cell is derived from a cell so modified. Thus, e.g., recombinant cells express genes that are not found within the native (non-recombinant) form of the cell or express native genes that are otherwise abnormally expressed, under expressed or not expressed at all. By the term “recombinant nucleic acid” herein is meant nucleic acid, originally formed in vitro, in general, by the manipulation of nucleic acid, e.g., using polymerases and endonucleases, in a form not normally found in nature. In this manner, operably linkage of different sequences is achieved. Thus an isolated nucleic acid, in a linear form, or an expression vector formed in vitro by ligating DNA molecules that are not normally joined, are both considered recombinant for the purposes of this invention. It is understood that once a recombinant nucleic acid is made and reintroduced into a host cell or organism, it will replicate non-recombinantly, i.e., using the in vivo cellular machinery of the host cell rather than in vitro manipulations; however, such nucleic acids, once produced recombinantly, although subsequently replicated non-recombinantly, are still considered recombinant for the purposes of the invention. Similarly, a “recombinant protein” is a protein made using recombinant techniques, i.e., through the expression of a recombinant nucleic acid as depicted above.

[0088] The term “heterologous” when used with reference to portions of a nucleic acid indicates that the nucleic acid comprises two or more subsequences that are not normally found in the same relationship to each other in nature. For instance, the nucleic acid is typically recombinantly produced, having two or more sequences, e.g., from unrelated genes arranged to make a new functional nucleic acid, e.g., a promoter from one source and a coding region from another source. Similarly, a heterologous protein will often refer to two or more subsequences that are not found in the same relationship to each other in nature (e.g., a fusion protein).

[0089] A “promoter” is defined as an array of nucleic acid control sequences that direct transcription of a nucleic acid. As used herein, a promoter includes necessary nucleic acid sequences near the start site of transcription, such as, in the case of a polymerase II type promoter, a TATA element. A promoter also optionally includes distal enhancer or repressor elements, which can be located as much as several thousand base pairs from the start site of transcription. A “constitutive” promoter is a promoter that is active under most environmental and developmental conditions. An “inducible” promoter is a promoter that is active under environmental or developmental regulation. The term “operably linked” refers to a functional linkage between a nucleic acid expression control sequence (such as a promoter, or array of transcription factor binding sites) and a second nucleic acid sequence, wherein the expression control sequence directs transcription of the nucleic acid corresponding to the second sequence.

[0090] An “expression vector” is a nucleic acid construct, generated recombinantly or synthetically, with a series of specified nucleic acid elements that permit transcription of a particular nucleic acid in a host cell. The expression vector can be part of a plasmid, virus, or nucleic acid fragment. Typically, the expression vector includes a nucleic acid to be transcribed operably linked to a promoter.

[0091] The phrase “selectively (or specifically) hybridizes to” refers to the binding, duplexing, or hybridizing of a molecule only to a particular nucleotide sequence that is determinative of the presence of the nucleotide sequence, in a heterogeneous population of nucleic acids and other biologics (e.g., total cellular or library DNA or RNA). Similarly, the phrase “specifically (or selectively) binds” to an antibody or “specifically (or selectively) immunoreactive with,” when referring to a protein or peptide, refers to a binding reaction that is determinative of the presence of the protein, in a heterogeneous population of proteins and other biologics. Thus, under designated immunoassay or nucleic acid hybridization conditions, the specified antibodies or nucleic acid probes bind to a particular protein nucleotide sequences at least two times the background and more typically more than 10 to 100 times background.

[0092] Specific binding to an antibody under such conditions requires an antibody that is selected for its specificity for a particular protein. For example, polyclonal antibodies raised to a particular protein, polymorphic variants, alleles, orthologs, and conservatively modified variants, or splice variants, or portions thereof, can be selected to obtain only those polyclonal antibodies that are specifically immunoreactive with the desired prostact cancer protein and not with other proteins. This selection may be achieved by subtracting out antibodies that cross-react with other molecules. A variety of immunoassay formats may be used to select antibodies specifically immunoreactive with a particular protein. For example, solid-phase ELISA immunoassays are routinely used to select antibodies specifically immunoreactive with a protein (see, e.g., Harlow & Lane, Antibodies, A Laboratory Manual (1988) for a description of immunoassay formats and conditions that can be used to determine specific immunoreactivity).

[0093] The phrase “stringent hybridization conditions” refers to conditions under which a probe will hybridize to its target subsequence, typically in a complex mixture of nucleic acids, but to no other sequences. Stringent conditions are sequence-dependent and will be different in different circumstances. Longer sequences hybridize specifically at higher temperatures. An extensive guide to the hybridization of nucleic acids is found in Tijssen, Techniques in Biochemistry and Molecular Biology—Hybridization with Nucleic Probes, “Overview of principles of hybridization and the strategy of nucleic acid assays” (1993). Generally, stringent conditions are selected to be about 5-10° C. lower than the thermal melting point (Tₘ) for the specific sequence at a defined ionic strength pH. The Tₘ is the temperature (under defined ionic strength, pH, and nucleic concentration) at which 50% of the probes complementary to the target hybridize to the target sequence at equilibrium (as the target sequences are present in excess, at Tₘ, 50% of the probes are occupied at equilibrium). Stringent conditions will be those in which the salt concentration is less than about 1.0 M sodium ion, typically about 0.01 to 1.0 M sodium ion concentration (or other salts) at pH 7.0 to 8.3 and the temperature is at least about 30° C. for short probes (e.g., 10 to 50 nucleotides) and at least about 60° C. for long probes (e.g., greater than 50 nucleotides). Stringent conditions may also be achieved with the addition of destabilizing agents such as formamide. For selective or specific hybridization, a positive signal is at least two times background, preferably 10 times background hybridization. Exemplary stringent hybridization conditions can be as following: 50% formamide, 5×SSC, and 1% SDS, incubating at 42° C., or, 5×SSC, 1% SDS, incubating at 65° C., with wash in 0.2×SSC, and 0.1% SDS at 65° C. For PCR, a temperature of about 36° C. is typical for low stringency amplification, although annealing temperatures may vary between about 32° C. and 48° C. depending on primer length. For high stringency PCR amplification, a temperature of about 62° C. is typical, although high stringency annealing temperatures can range from about 50° C. to about 65° C., depending on the primer length and specificity. Typical cycle conditions for both high and low stringency amplifications include a denaturation phase of 90° C.-95° C. for 30 sec-2 min., an annealing phase lasting 30 sec.-2 min., and an extension phase of about 72° C. for 1-2 min. Protocols and guidelines for low and high stringency amplification reactions are provided, e.g., in Innis et al. (1990) PCR Protocols, A Guide to Methods and Applications, Academic Press, Inc. N.Y.).

[0094] Nucleic acids that do not hybridize to each other under stringent conditions are still substantially identical if the polypeptides which they encode are substantially identical. This occurs, e.g., when a copy of a nucleic acid is created using the maximum codon degeneracy permitted by the genetic code. In such cases, the nucleic acids typically hybridize under moderately stringent hybridization conditions. Exemplary “moderately stringent hybridization conditions” include a hybridization in a buffer of 40% formamide, 1 M NaCl, 1% SDS at 37° C., and a wash in 1×SSC at 45° C. A positive hybridization is at least twice background. Those of ordinary skill will readily recognize that alternative hybridization and wash conditions can be utilized to provide conditions of similar stringency. Additional guidelines for determining hybridization parameters are provided in numerous reference, e.g., and Current Protocols in Molecular Biology, ed. Ausubel, et al.

[0095] The phrase “functional effects” in the context of assays for testing compounds that modulate activity of a prostate cancer protein includes the determination of a parameter that is indirectly or directly under the influence of the prostate cancer protein or nucleic acid, e.g., a functional, physical, or chemical effect, such as the ability to decrease prostate cancer. It includes ligand binding activity; cell growth on soft agar; anchorage dependence; contact inhibition and density limitation of growth; cellular proliferation; cellular transformation; growth factor or serum dependence; tumor specific marker levels; invasiveness into Matrigel; tumor growth and metastasis in vivo; mRNA and protein expression in cells undergoing metastasis, and other characteristics of prostate cancer cells. “Functional effects” include in vitro, in vivo, and ex vivo activities.

[0096] By “determining the functional effect” is meant assaying for a compound that increases or decreases a parameter that is indirectly or directly under the influence of a prostate cancer protein sequence, e.g., functional, enzymatic, physical and chemical effects. Such functional effects can be measured by any means known to those skilled in the art, e.g., changes in spectroscopic characteristics (e.g., fluorescence, absorbance, refractive index), hydrodynamic (e.g., shape), chromatographic, or solubility properties for the protein, measuring inducible markers or transcriptional activation of the prostate cancer protein; measuring binding activity or binding assays, e.g. binding to antibodies or other ligands, and measuring cellular proliferation. Determination of the functional effect of a compound on prostate cancer can also be performed using prostate cancer assays known to those of skill in the art such as an in vitro assays, e.g., cell growth on soft agar; anchorage dependence; contact inhibition and density limitation of growth; cellular proliferation; cellular transformation; growth factor or serum dependence; tumor specific marker levels; invasiveness into Matrigel; tumor growth and metastasis in vivo; mRNA and protein expression in cells undergoing metastasis, and other characteristics of prostate cancer cells. The functional effects can be evaluated by many means known to those skilled in the art, e.g., microscopy for quantitative or qualitative measures of alterations in morphological features, measurement of changes in RNA or protein levels for prostate cancer-associated sequences, measurement of RNA stability, identification of downstream or reporter gene expression (CAT, luciferase, β-gal, GFP and the like), e.g., via chemiluminescence, fluorescence, colorimetric reactions, antibody binding, inducible markers, and ligand binding assays.

[0097] “Inhibitors”, “activators”, and “modulators” of prostate cancer polynucleotide and polypeptide sequences are used to refer to activating, inhibitory, or modulating molecules or compounds identified using in vitro and in vivo assays of prostate cancer polynucleotide and polypeptide sequences. Inhibitors are compounds that, e.g., bind to, partially or totally block activity, decrease, prevent, delay activation, inactivate, desensitize, or down regulate the activity or expression of prostate cancer proteins, e.g., antagonists. Antisense nucleic acids may seem to inhibit expression and subsequent function of the protein. “Activators” are compounds that increase, open, activate, facilitate, enhance activation, sensitize, agonize, or up regulate prostate cancer protein activity. Inhibitors, activators, or modulators also include genetically modified versions of prostate cancer proteins, e.g., versions with altered activity, as well as naturally occurring and synthetic ligands, antagonists, agonists, antibodies, small chemical molecules and the like. Such assays for inhibitors and activators include, e.g., expressing the prostate cancer protein in vitro, in cells, or cell membranes, applying putative modulator compounds, and then determining the functional effects on activity, as described above. Activators and inhibitors of prostate cancer can also be identified by incubating prostate cancer cells with the test compound and determining increases or decreases in the expression of 1 or more prostate cancer proteins, e.g., 1, 2, 3, 4, 5, 10, 15, 20, 25, 30, 40, 50 or more prostate cancer proteins, such as prostate cancer proteins encoded by the sequences set out in Tables 1-16.

[0098] Samples or assays comprising prostate cancer proteins that are treated with a potential activator, inhibitor, or modulator are compared to control samples without the inhibitor, activator, or modulator to examine the extent of inhibition. Control samples (untreated with inhibitors) are assigned a relative protein activity value of 100%. Inhibition of a polypeptide is achieved when the activity value relative to the control is about 80%, preferably 50%, more preferably 25-0%. Activation of a prostate cancer polypeptide is achieved when the activity value relative to the control (untreated with activators) is 110%, more preferably 150%, more preferably 200-500% (i.e., two to five fold higher relative to the control), more preferably 1000-3000% higher.

[0099] The phrase “changes in cell growth” refers to any change in cell growth and proliferation characteristics in vitro or in vivo, such as formation of foci, anchorage independence, semi-solid or soft agar growth, changes in contact inhibition and density limitation of growth, loss of growth factor or serum requirements, changes in cell morphology, gaining or losing immortalization, gaining or losing tumor specific markers, ability to form or suppress tumors when injected into suitable animal hosts, and/or immortalization of the cell. See, e.g., Freshney, Culture of Animal Cells a Manual of Basic Technique pp. 231-241 (3^{rd} ed. 1994).

[0100] “Tumor cell” refers to precancerous, cancerous, and normal cells in a tumor.

[0101] “Cancer cells,” “transformed” cells or “transformation” in tissue culture, refers to spontaneous or induced phenotypic changes that do not necessarily involve the uptake of new genetic material. Although transformation can arise from infection with a transforming virus and incorporation of new genomic DNA, or uptake of exogenous DNA, it can also arise spontaneously or following exposure to a carcinogen, thereby mutating an endogenous gene. Transformation is associated with phenotypic changes, such as immortalization of cells, aberrant growth control, nonmorphological changes, and/or malignancy (see, Freshney, Culture of Animal Cells a Manual of Basic Technique (3^{rd} ed. 1994)).

[0102] “Antibody” refers to a polypeptide comprising a framework region from an immunoglobulin gene or fragments thereof that specifically binds and recognizes an antigen. The recognized immunoglobulin genes include the kappa, lambda, alpha, gamma, delta, epsilon, and mu constant region genes, as well as the myriad immunoglobulin variable region genes. Light chains are classified as either kappa or lambda. Heavy chains are classified as gamma, mu, alpha, delta, or epsilon, which in turn define the immunoglobulin classes, IgG, IgM, IgA, IgD and IgE, respectively. Typically, the antigen-binding region of an antibody or its functional equivalent will be most critical in specificity and affinity of binding. See Paul, Fundamental Immunology.

[0103] An exemplary immunoglobulin (antibody) structural unit comprises a tetramer. Each tetramer is composed of two identical pairs of polypeptide chains, each pair having one “light” (about 25 kD) and one “heavy” chain (about 50-70 kD). The N-terminus of each chain defines a variable region of about 100 to 110 or more amino acids primarily responsible for antigen recognition. The terms variable light chain (V_{L}) and variable heavy chain (V_{H}) refer to these light and heavy chains respectively.

[0104] Antibodies exist, e.g., as intact immunoglobulins or as a number of well-characterized fragments produced by digestion with various peptidases. Thus, e.g., pepsin digests an antibody below the disulfide linkages in the hinge region to produce F(ab)′₂, a dimer of Fab which itself is a light chain joined to V_{H}-C_{H}1 by a disulfide bond. The F(ab)′₂ may be reduced under mild conditions to break the disulfide linkage in the hinge region, thereby converting the F(ab)′₂ dimer into an Fab′ monomer. The Fab′ monomer is essentially Fab with part of the hinge region (see Fundamental Immunology (Paul ed., 3d ed. 1993). While various antibody fragments are defined in terms of the digestion of an intact antibody, one of skill will appreciate that such fragments may be synthesized de novo either chemically or by using recombinant DNA methodology. Thus, the term antibody, as used herein, also includes antibody fragments either produced by the modification of whole antibodies, or those synthesized de novo using recombinant DNA methodologies (e.g., single chain Fv) or those identified using phage display libraries (see, e.g., McCafferty et al., Nature 348:552-554 (1990))

[0105] For preparation of antibodies, e.g., recombinant, monoclonal, or polyclonal antibodies, many technique known in the art can be used (see, e.g., Kohler & Milstein, Nature 256:495-497 (1975); Kozbor et al., Immunology Today 4:72 (1983); Cole et al., pp. 77-96 in Monoclonal Antibodies and Cancer Therapy (1985); Coligan, Current Protocols in Immunology (1991); Harlow & Lane, Antibodies, A Laboratory Manual (1988); and Goding, Monoclonal Antibodies: Principles and Practice (2d ed. 1986)). Techniques for the production of single chain antibodies (U.S. Pat. No. 4,946,778) can be adapted to produce antibodies to polypeptides of this invention. Also, transgenic mice, or other organisms such as other mammals, may be used to express humanized antibodies. Alternatively, phage display technology can be used to identify antibodies and heteromeric Fab fragments that specifically bind to selected antigens (see, e.g., McCafferty et al., Nature 348:552-554 (1990); Marks et al., Biotechnology 10:779-783 (1992)).

[0106] A “chimeric antibody” is an antibody molecule in which (a) the constant region, or a portion thereof, is altered, replaced or exchanged so that the antigen binding site (variable region) is linked to a constant region of a different or altered class, effector function and/or species, or an entirely different molecule which confers new properties to the chimeric antibody, e.g., an enzyme, toxin, hormone, growth factor, drug, etc.; or (b) the variable region, or a portion thereof, is altered, replaced or exchanged with a variable region having a different or altered antigen specificity.

Identification of Prostate Cancer-Associated Sequences

[0107] In one aspect, the expression levels of genes are determined in different patient samples for which diagnosis information is desired, to provide expression profiles. An expression profile of a particular sample is essentially a “fingerprint” of the state of the sample; while two states may have any particular gene similarly expressed, the evaluation of a number of genes simultaneously allows the generation of a gene expression profile that is characteristic of the state of the cell. That is, normal tissue (e.g., normal prostate or other tissue) may be distinguished from cancerous or metastatic cancerous tissue of the prostate, or prostate cancer tissue or metastatic prostate cancerous tissue can be compared with tissue samples of prostate and other tissues from surviving cancer patients. By comparing expression profiles of tissue in known different prostate cancer states, information regarding which genes are important (including both up- and down-regulation of genes) in each of these states is obtained.

[0108] The identification of sequences that are differentially expressed in prostate cancer versus non-prostate cancer tissue allows the use of this information in a number of ways. For example, a particular treatment regime may be evaluated: does a chemotherapeutic drug act to down-regulate prostate cancer, and thus tumor growth or recurrence, in a particular patient. Similarly, diagnosis and treatment outcomes may be done or confirmed by comparing patient samples with the known expression profiles. Metastatic tissue can also be analyzed to determine the stage of prostate cancer in the tissue. Furthermore, these gene expression profiles (or individual genes) allow screening of drug candidates with an eye to mimicking or altering a particular expression profile; e.g., screening can be done for drugs that suppress the prostate cancer expression profile. This may be done by making biochips comprising sets of the important prostate cancer genes, which can then be used in these screens. These methods can also be done on the protein basis; that is, protein expression levels of the prostate cancer proteins can be evaluated for diagnostic purposes or to screen candidate agents. In addition, the prostate cancer nucleic acid sequences can be administered for gene therapy purposes, including the administration of antisense nucleic acids, or the prostate cancer proteins (including antibodies and other modulators thereof) administered as therapeutic drugs.

[0109] Thus the present invention provides nucleic acid and protein sequences that are differentially expressed in prostate cancer, herein termed “prostate cancer sequences.” As outlined below, prostate cancer sequences include those that are up-regulated (i.e., expressed at a higher level) in prostate cancer, as well as those that are down-regulated (i.e., expressed at a lower level). In a preferred embodiment, the prostate cancer sequences are from humans; however, as will be appreciated by those in the art, prostate cancer sequences from other organisms may be useful in animal models of disease and drug evaluation; thus, other prostate cancer sequences are provided, from vertebrates, including mammals, including rodents (rats, mice, hamsters, guinea pigs, etc.), primates, farm animals (including sheep, goats, pigs, cows, horses, etc.) and pets, e.g., (dogs, cats, etc.). Prostate cancer sequences from other organisms may be obtained using the techniques outlined below.

[0110] Prostate cancer sequences can include both nucleic acid and amino acid sequences. As will be appreciated by those in the art and is more fully outlined below, prostate cancer nucleic acid sequences are useful in a variety of applications, including diagnostic applications, which will detect naturally occurring nucleic acids, as well as screening applications; e.g., biochips comprising nucleic acid probes or PCR microtiter plates with selected probes to the prostate cancer sequences can be generated.

[0111] A prostate cancer sequence can be initially identified by substantial nucleic acid and/or amino acid sequence homology to the prostate cancer sequences outlined herein. Such homology can be based upon the overall nucleic acid or amino acid sequence, and is generally determined as outlined below, using either homology programs or hybridization conditions.

[0112] For identifying prostate cancer-associated sequences, the prostate cancer screen typically includes comparing genes identified in different tissues, e.g., normal and cancerous tissues, or tumor tissue samples from patients who have metastatic disease vs. non metastatic tissue. Other suitable tissue comparisons include comparing prostate cancer samples with metastatic cancer samples from other cancers, such as lung, breast, gastrointestinal cancers, ovarian, etc. Samples of different stages of prostate cancer, e.g., survivor tissue, drug resistant states, and tissue undergoing metastasis, are applied to biochips comprising nucleic acid probes. The samples are first microdissected, if applicable, and treated as is known in the art for the preparation of mRNA. Suitable biochips are commercially available, e.g. from Affymetrix. Gene expression profiles as described herein are generated and the data analyzed.

[0113] In one embodiment, the genes showing changes in expression as between normal and disease states are compared to genes expressed in other normal tissues, preferably normal prostate, but also including, and not limited to lung, heart, brain, liver, breast, kidney, muscle, colon, small intestine, large intestine, spleen, bone and placenta. In a preferred embodiment, those genes identified during the prostate cancer screen that are expressed in any significant amount in other tissues are removed from the profile, although in some embodiments, this is not necessary. That is, when screening for drugs, it is usually preferable that the target be disease specific, to minimize possible side effects.

[0114] In a preferred embodiment, prostate cancer sequences are those that are up-regulated in prostate cancer; that is, the expression of these genes is higher in the prostate cancer tissue as compared to non-cancerous tissue. “Up-regulation” as used herein often means at least about a two-fold change, preferably at least about a three fold change, with at least about five-fold or higher being preferred. All unigene cluster identification numbers and accession numbers herein are for the GenBank sequence database and the sequences of the accession numbers are hereby expressly incorporated by reference. GenBank is known in the art, see, e.g., Benson, D A, et al., Nucleic Acids Research 26:1-7 (1998) and http://www.ncbi.nlm.nih.gov/. Sequences are also available in other databases, e.g., European Molecular Biology Laboratory (EMBL) and DNA Database of Japan (DDBJ).

[0115] In another preferred embodiment, prostate cancer sequences are those that are down-regulated in prostate cancer; that is, the expression of these genes is lower in prostate cancer tissue as compared to non-cancerous tissue (see, e.g., Tables 8, 12 and 14). “Down-regulation” as used herein often means at least about a 1.5-fold change more preferrably a two-fold change, preferably at least about a three fold change, with at least about five-fold or higher being most preferred.

Informatics

[0116] The ability to identify genes that are over or under expressed in prostate cancer can additionally provide high-resolution, high-sensitivity datasets which can be used in the areas of diagnostics, therapeutics, drug development, pharmacogenetics, protein structure, biosensor development, and other related areas. For example, the expression profiles can be used in diagnostic or prognostic evaluation of patients with prostate cancer. Or as another example, subcellular toxicological information can be generated to better direct drug structure and activity correlation (see Anderson, Pharmaceutical Proteomics: Targets, Mechanism, and Function, paper presented at the IBC Proteomics conference, Coronado, Calif. (Jun. 11-12, 1998)). Subcellular toxicological information can also be utilized in a biological sensor device to predict the likely toxicological effect of chemical exposures and likely tolerable exposure thresholds (see U.S. Pat. No. 5,811,231). Similar advantages accrue from datasets relevant to other biomolecules and bioactive agents (e.g., nucleic acids, saccharides, lipids, drugs, and the like).

[0117] Thus, in another embodiment, the present invention provides a database that includes at least one set of assay data. The data contained in the database is acquired, e.g., using array analysis either singly or in a library format. The database can be in substantially any form in which data can be maintained and transmitted, but is preferably an electronic database. The electronic database of the invention can be maintained on any electronic device allowing for the storage of and access to the database, such as a personal computer, but is preferably distributed on a wide area network, such as the World Wide Web.

[0118] The focus of the present section on databases that include peptide sequence data is for clarity of illustration only. It will be apparent to those of skill in the art that similar databases can be assembled for any assay data acquired using an assay of the invention.

[0119] The compositions and methods for identifying and/or quantitating the relative and/or absolute abundance of a variety of molecular and macromolecular species from a biological sample undergoing prostate cancer, i.e., the identification of prostate cancer-associated sequences described herein, provide an abundance of information, which can be correlated with pathological conditions, predisposition to disease, drug testing, therapeutic monitoring, gene-disease causal linkages, identification of correlates of immunity and physiological status, among others. Although the data generated from the assays of the invention is suited for manual review and analysis, in a preferred embodiment, prior data processing using high-speed computers is utilized.

[0120] An array of methods for indexing and retrieving biomolecular information is known in the art. For example, U.S. Pat. Nos. 6,023,659 and 5,966,712 disclose a relational database system for storing biomolecular sequence information in a manner that allows sequences to be catalogued and searched according to one or more protein function hierarchies. U.S. Pat. No. 5,953,727 discloses a relational database having sequence records containing information in a format that allows a collection of partial-length DNA sequences to be catalogued and searched according to association with one or more sequencing projects for obtaining full-length sequences from the collection of partial length sequences. U.S. Pat. No. 5,706,498 discloses a gene database retrieval system for making a retrieval of a gene sequence similar to a sequence data item in a gene database based on the degree of similarity between a key sequence and a target sequence. U.S. Pat. No. 5,538,897 discloses a method using mass spectroscopy fragmentation patterns of peptides to identify amino acid sequences in computer databases by comparison of predicted mass spectra with experimentally-derived mass spectra using a closeness-of-fit measure. U.S. Pat. No. 5,926,818 discloses a multi-dimensional database comprising a functionality for multi-dimensional data analysis described as on-line analytical processing (OLAP), which entails the consolidation of projected and actual data according to more than one consolidation path or dimension. U.S. Pat. No. 5,295,261 reports a hybrid database structure in which the fields of each database record are divided into two classes, navigational and informational data, with navigational fields stored in a hierarchical topological map which can be viewed as a tree structure or as the merger of two or more such tree structures.

[0121] See also Mount et al., Bioinformatics (2001); Biological Sequence Analysis: Probabilistic Models of Proteins and Nucleic Acids (Durbin et al., eds., 1999); Bioinformatics: A Practical Guide to the Analysis of Genes and Proteins (Baxevanis & Oeullette eds., 1998)); Rashidi & Buehler, Bioinformatics: Basic Applications in Biological Science and Medicine (1999); Introduction to Computational Molecular Biology (Setubal et al., eds 1997); Bioinformatics: Methods and Protocols (Misener & Krawetz, eds, 2000); Bioinformatics: Sequence, Structure, and Databanks: A Practical Approach (Higgins & Taylor, eds., 2000); Brown, Bioinformatics: A Biologist's Guide to Biocomputing and the Internet (2001); Han & Kamber, Data Mining: Concepts and Techniques (2000); and Waterman, Introduction to Computational Biology: Maps, Sequences, and Genomes (1995).

[0122] The present invention provides a computer database comprising a computer and software for storing in computer-retrievable form assay data records cross-tabulated, e.g., with data specifying the source of the target-containing sample from which each sequence specificity record was obtained.

[0123] In an exemplary embodiment, at least one of the sources of target-containing sample is from a control tissue sample known to be free of pathological disorders. In a variation, at least one of the sources is a known pathological tissue specimen, e.g., a neoplastic lesion or another tissue specimen to be analyzed for prostate cancer. In another variation, the assay records cross-tabulate one or more of the following parameters for each target species in a sample: (1) a unique identification code, which can include, e.g., a target molecular structure and/or characteristic separation coordinate (e.g., electrophoretic coordinates); (2) sample source; and (3) absolute and/or relative quantity of the target species present in the sample.

[0124] The invention also provides for the storage and retrieval of a collection of target data in a computer data storage apparatus, which can include magnetic disks, optical disks, magneto-optical disks, DRAM, SRAM, SGRAM, SDRAM, RDRAM, DDR RAM, magnetic bubble memory devices, and other data storage devices, including CPU registers and on-CPU data storage arrays. Typically, the target data records are stored as a bit pattern in an array of magnetic domains on a magnetizable medium or as an array of charge states or transistor gate states, such as an array of cells in a DRAM device (e.g., each cell comprised of a transistor and a charge storage area, which may be on the transistor). In one embodiment, the invention provides such storage devices, and computer systems built therewith, comprising a bit pattern encoding a protein expression fingerprint record comprising unique identifiers for at least 10 target data records cross-tabulated with target source.

[0125] When the target is a peptide or nucleic acid, the invention preferably provides a method for identifying related peptide or nucleic acid sequences, comprising performing a computerized comparison between a peptide or nucleic acid sequence assay record stored in or retrieved from a computer storage device or database and at least one other sequence. The comparison can include a sequence analysis or comparison algorithm or computer program embodiment thereof (e.g., FASTA, TFASTA, GAP, BESTFIT) and/or the comparison may be of the relative amount of a peptide or nucleic acid sequence in a pool of sequences determined from a polypeptide or nucleic acid sample of a specimen.

[0126] The invention also preferably provides a magnetic disk, such as an IBM-compatible (DOS, Windows, Windows95/98/2000, Windows NT, OS/2) or other format (e.g., Linux, SunOS, Solaris, AIX, SCO Unix, VMS, MV, Macintosh, etc.) floppy diskette or hard (fixed, Winchester) disk drive, comprising a bit pattern encoding data from an assay of the invention in a file format suitable for retrieval and processing in a computerized sequence analysis, comparison, or relative quantitation method.

[0127] The invention also provides a network, comprising a plurality of computing devices linked via a data link, such as an Ethernet cable (coax or 10BaseT), telephone line, ISDN line, wireless network, optical fiber, or other suitable signal transmission medium, whereby at least one network device (e.g., computer, disk array, etc.) comprises a pattern of magnetic domains (e.g., magnetic disk) and/or charge domains (e.g., an array of DRAM cells) composing a bit pattern encoding data acquired from an assay of the invention.

[0128] The invention also provides a method for transmitting assay data that includes generating an electronic signal on an electronic communications device, such as a modem, ISDN terminal adapter, DSL, cable modem, ATM switch, or the like, wherein the signal includes (in native or encrypted format) a bit pattern encoding data from an assay or a database comprising a plurality of assay results obtained by the method of the invention.

[0129] In a preferred embodiment, the invention provides a computer system for comparing a query target to a database containing an array of data structures, such as an assay result obtained by the method of the invention, and ranking database targets based on the degree of identity and gap weight to the target data. A central processor is preferably initialized to load and execute the computer program for alignment and/or comparison of the assay results. Data for a query target is entered into the central processor via an I/O device. Execution of the computer program results in the central processor retrieving the assay data from the data file, which comprises a binary description of an assay result.

[0130] The target data or record and the computer program can be transferred to secondary memory, which is typically random access memory (e.g., DRAM, SRAM, SGRAM, or SDRAM). Targets are ranked according to the degree of correspondence between a selected assay characteristic (e.g., binding to a selected affinity moiety) and the same characteristic of the query target and results are output via an I/O device. For example, a central processor can be a conventional computer (e.g., Intel Pentium, PowerPC, Alpha, PA-8000, SPARC, MIPS 4400, MIPS 10000, VAX, etc.); a program can be a commercial or public domain molecular biology software package (e.g., UWGCG Sequence Analysis Software, Darwin); a data file can be an optical or magnetic disk, a data server, a memory device (e.g., DRAM, SRAM, SGRAM, SDRAM, EPROM, bubble memory, flash memory, etc.); an I/O device can be a terminal comprising a video display and a keyboard, a modem, an ISDN terminal adapter, an Ethernet port, a punched card reader, a magnetic strip reader, or other suitable I/O device.

[0131] The invention also preferably provides the use of a computer system, such as that described above, which comprises: (1) a computer; (2) a stored bit pattern encoding a collection of peptide sequence specificity records obtained by the methods of the invention, which may be stored in the computer; (3) a comparison target, such as a query target; and (4) a program for alignment and comparison, typically with rank-ordering of comparison results on the basis of computed similarity values.

Characteristics of Prostate Cancer-Associated Proteins

[0132] Prostate cancer proteins of the present invention may be classified as secreted proteins, transmembrane proteins or intracellular proteins. In one embodiment, the prostate cancer protein is an intracellular protein. Intracellular proteins may be found in the cytoplasm and/or in the nucleus. Intracellular proteins are involved in all aspects of cellular function and replication (including, e.g., signaling pathways); aberrant expression of such proteins often results in unregulated or disregulated cellular processes (see, e.g., Molecular Biology of the Cell (Alberts, ed., 3rd ed., 1994). For example, many intracellular proteins have enzymatic activity such as protein kinase activity, protein phosphatase activity, protease activity, nucleotide cyclase activity, polymerase activity and the like. Intracellular proteins also serve as docking proteins that are involved in organizing complexes of proteins, or targeting proteins to various subcellular localizations, and are involved in maintaining the structural integrity of organelles.

[0133] An increasingly appreciated concept in characterizing proteins is the presence in the proteins of one or more motifs for which defined functions have been attributed. In addition to the highly conserved sequences found in the enzymatic domain of proteins, highly conserved sequences have been identified in proteins that are involved in protein-protein interaction. For example, Src-homology-2 (SH2) domains bind tyrosine-phosphorylated targets in a sequence dependent manner. PTB domains, which are distinct from SH2 domains, also bind tyrosine phosphorylated targets. SH3 domains bind to proline-rich targets. In addition, PH domains, tetratricopeptide repeats and WD domains to name only a few, have been shown to mediate protein-protein interactions. Some of these may also be involved in binding to phospholipids or other second messengers. As will be appreciated by one of ordinary skill in the art, these motifs can be identified on the basis of primary sequence; thus, an analysis of the sequence of proteins may provide insight into both the enzymatic potential of the molecule and/or molecules with which the protein may associate. One useful database is Pfam (protein families), which is a large collection of multiple sequence alignments and hidden Markov models covering many common protein domains. Versions are available via the internet from Washington University in St. Louis, the Sanger Center in England, and the Karolinska Institute in Sweden (see, e.g., Bateman et al., Nuc. Acids Res. 28:263-266 (2000); Sonnhammer et al., Proteins 28:405-420 (1997); Bateman et al., Nuc. Acids Res. 27:260-262 (1999); and Sonnhammer et al., Nuc. Acids Res. 26:320-322-(1998)).

[0134] In another embodiment, the prostate cancer sequences are transmembrane proteins. Transmembrane proteins are molecules that span a phospholipid bilayer of a cell. They may have an intracellular domain, an extracellular domain, or both. The intracellular domains of such proteins may have a number of functions including those already described for intracellular proteins. For example, the intracellular domain may have enzymatic activity and/or may serve as a binding site for additional proteins. Frequently the intracellular domain of transmembrane proteins serves both roles. For example certain receptor tyrosine kinases have both protein kinase activity and SH2 domains. In addition, autophosphorylation of tyrosines on the receptor molecule itself, creates binding sites for additional SH2 domain containing proteins.

[0135] Transmembrane proteins may contain from one to many transmembrane domains. For example, receptor tyrosine kinases, certain cytokine receptors, receptor guanylyl cyclases and receptor serine/threonine protein kinases contain a single transmembrane domain. However, various other proteins including channels and adenylyl cyclases contain numerous transmembrane domains. Many important cell surface receptors such as G protein coupled receptors (GPCRs) are classified as “seven transmembrane domain” proteins, as they contain 7 membrane spanning regions. Characteristics of transmembrane domains include approximately 20 consecutive hydrophobic amino acids that may be followed by charged amino acids. Therefore, upon analysis of the amino acid sequence of a particular protein, the localization and number of transmembrane domains within the protein may be predicted (see, e.g. PSORT web site http://psort.nibb.ac.jp/). Important transmembrane protein receptors include, but are not limited to the insulin receptor, insulin-like growth factor receptor, human growth hormone receptor, glucose transporters, transferrin receptor, epidermal growth factor receptor, low density lipoprotein receptor, epidermal growth factor receptor, leptin receptor, interleukin receptors, e.g. IL-1 receptor, IL-2 receptor,

[0136] The extracellular domains of transmembrane proteins are diverse; however, conserved motifs are found repeatedly among various extracellular domains. Conserved structure and/or functions have been ascribed to different extracellular motifs. Many extracellular domains are involved in binding to other molecules. In one aspect, extracellular domains are found on receptors. Factors that bind the receptor domain include circulating ligands, which may be peptides, proteins, or small molecules such as adenosine and the like. For example, growth factors such as EGF, FGF and PDGF are circulating growth factors that bind to their cognate receptors to initiate a variety of cellular responses. Other factors include cytokines, mitogenic factors, neurotrophic factors and the like. Extracellular domains also bind to cell-associated molecules. In this respect, they mediate cell-cell interactions. Cell-associated ligands can be tethered to the cell, e.g., via a glycosylphosphatidylinositol (GPI) anchor, or may themselves be transmembrane proteins. Extracellular domains also associate with the extracellular matrix and contribute to the maintenance of the cell structure.

[0137] Prostate cancer proteins that are transmembrane are particularly preferred in the present invention as they are readily accessible targets for immunotherapeutics, as are described herein. In addition, as outlined below, transmembrane proteins can be also useful in imaging modalities. Antibodies may be used to label such readily accessible proteins in situ. Alternatively, antibodies can also label intracellular proteins, in which case samples are typically permeablized to provide access to intracellular proteins.

[0138] It will also be appreciated by those in the art that a transmembrane protein can be made soluble by removing transmembrane sequences, e.g., through recombinant methods. Furthermore, transmembrane proteins that have been made soluble can be made to be secreted through recombinant means by adding an appropriate signal sequence.

[0139] In another embodiment, the prostate cancer proteins are secreted proteins; the secretion of which can be either constitutive or regulated. These proteins have a signal peptide or signal sequence that targets the molecule to the secretory pathway. Secreted proteins are involved in numerous physiological events; by virtue of their circulating nature, they serve to transmit signals to various other cell types. The secreted protein may function in an autocrine manner (acting on the cell that secreted the factor), a paracrine manner (acting on cells in close proximity to the cell that secreted the factor) or an endocrine manner (acting on cells at a distance). Thus secreted molecules find use in modulating or altering numerous aspects of physiology. Prostate cancer proteins that are secreted proteins are particularly preferred in the present invention as they serve as good targets for diagnostic markers, e.g., for blood, plasma, serum, or stool tests.

Use of Prostate Cancer Nucleic Acids

[0140] As described above, prostate cancer sequence is initially identified by substantial nucleic acid and/or amino acid sequence homology or linkage to the prostate cancer sequences outlined herein. Such homology can be based upon the overall nucleic acid or amino acid sequence, and is generally determined as outlined below, using either homology programs or hybridization conditions. Typically, linked sequences on a mRNA are found on the same molecule.

[0141] The prostate cancer nucleic acid sequences of the invention, e.g., the sequences in Tables 1-16, can be fragments of larger genes, i.e., they are nucleic acid segments. “Genes” in this context includes coding regions, non-coding regions, and mixtures of coding and non-coding regions. Accordingly, as will be appreciated by those in the art, using the sequences provided herein, extended sequences, in either direction, of the prostate cancer genes can be obtained, using techniques well known in the art for cloning either longer sequences or the full length sequences; see Ausubel, et al., supra. Much can be done by informatics and many sequences can be clustered to include multiple sequences corresponding to a single gene, e.g., systems such as UniGene (see, http://www.ncbi.nlm.nih.gov/UniGene/).

[0142] Once the prostate cancer nucleic acid is identified, it can be cloned and, if necessary, its constituent parts recombined to form the entire prostate cancer nucleic acid coding regions or the entire mRNA sequence. Once isolated from its natural source, e.g., contained within a plasmid or other vector or excised therefrom as a linear nucleic acid segment, the recombinant prostate cancer nucleic acid can be further-used as a probe to identify and isolate other prostate cancer nucleic acids, e.g., extended coding regions. It can also be used as a “precursor” nucleic acid to make modified or variant prostate cancer nucleic acids and proteins.

[0143] The prostate cancer nucleic acids of the present invention are used in several ways. In a first embodiment, nucleic acid probes to the prostate cancer nucleic acids are made and attached to biochips to be used in screening and diagnostic methods, as outlined below, or for administration, e.g., for gene therapy, vaccine, and/or antisense applications. Alternatively, the prostate cancer nucleic acids that include coding regions of prostate cancer proteins can be put into expression vectors for the expression of prostate cancer proteins, again for screening purposes or for administration to a patient.

[0144] In a preferred embodiment, nucleic acid probes to prostate cancer nucleic acids (both the nucleic acid sequences outlined in the figures and/or the complements thereof) are made. The nucleic acid probes attached to the biochip are designed to be substantially complementary to the prostate cancer nucleic acids, i.e. the target sequence (either the target sequence of the sample or to other probe sequences, e.g., in sandwich assays), such that hybridization of the target sequence and the probes of the present invention occurs. As outlined below, this complementarity need not be perfect; there may be any number of base pair mismatches which will interfere with hybridization between the target sequence and the single stranded nucleic acids of the present invention. However, if the number of mutations is so great that no hybridization can occur under even the least stringent of hybridization conditions, the sequence is not a complementary target sequence. Thus, by “substantially complementary” herein is meant that the probes are sufficiently complementary to the target sequences to hybridize under normal reaction conditions, particularly high stringency conditions, as outlined herein.

[0145] A nucleic acid probe is generally single stranded but can be partially single and partially double stranded. The strandedness of the probe is dictated by the structure, composition, and properties of the target sequence. In general, the nucleic acid probes range from about 8 to about 100 bases long, with from about 10 to about 80 bases being preferred, and from about 30 to about 50 bases being particularly preferred. That is, generally whole genes are not used. In some embodiments, much longer nucleic acids can be used, up to hundreds of bases.

[0146] In a preferred embodiment, more than one probe per sequence is used, with either overlapping probes or probes to different sections of the target being used. That is, two, three, four or more probes, with three being preferred, are used to build in a redundancy for a particular target. The probes can be overlapping (i.e., have some sequence in common), or separate. In some cases, PCR primers may be used to amplify signal for higher sensitivity.

[0147] As will be appreciated by those in the art, nucleic acids can be attached or immobilized to a solid support in a wide variety of ways. By “immobilized” and grammatical equivalents herein is meant the association or binding between the nucleic acid probe and the solid support is sufficient to be stable under the conditions of binding, washing, analysis, and removal as outlined below. The binding can typically be covalent or non-covalent. By “non-covalent binding” and grammatical equivalents herein is meant one or more of electrostatic, hydrophilic, and hydrophobic interactions. Included in non-covalent binding is the covalent attachment of a molecule, such as, streptavidin to the support and the non-covalent binding of the biotinylated probe to the streptavidin. By “covalent binding” and grammatical equivalents herein is meant that the two moieties, the solid support and the probe, are attached by at least one bond, including sigma bonds, pi bonds and coordination bonds. Covalent bonds can be formed directly between the probe and the solid support or can be formed by a cross linker or by inclusion of a specific reactive group on either the solid support or the probe or both molecules. Immobilization may also involve a combination of covalent and non-covalent interactions.

[0148] In general, the probes are attached to the biochip in a wide variety of ways, as will be appreciated by those in the art. As described herein, the nucleic acids can either be synthesized first, with subsequent attachment to the biochip, or can be directly synthesized on the biochip.

[0149] The biochip comprises a suitable solid substrate. By “substrate” or “solid support” or other grammatical equivalents herein is meant a material that can be modified to contain discrete individual sites appropriate for the attachment or association of the nucleic acid probes and is amenable to at least one detection method. As will be appreciated by those in the art, the number of possible substrates are very large, and include, but are not limited to, glass and modified or functionalized glass, plastics (including acrylics, polystyrene and copolymers of styrene and other materials, polypropylene, polyethylene, polybutylene, polyurethanes, TeflonJ, etc.), polysaccharides, nylon or nitrocellulose, resins, silica or silica-based materials including silicon and modified silicon, carbon, metals, inorganic glasses, plastics, etc. In general, the substrates allow optical detection and do not appreciably fluoresce. A preferred substrate is described in copending application entitled Reusable Low Fluorescent Plastic Biochip, U.S. application Ser. No. 09/270,214, filed Mar. 15, 1999, herein incorporated by reference in its entirety.

[0150] Generally the substrate is planar, although as will be appreciated by those in the art, other configurations of substrates may be used as well. For example, the probes may be placed on the inside surface of a tube, for flow-through sample analysis to minimize sample volume. Similarly, the substrate may be flexible, such as a flexible foam, including closed cell foams made of particular plastics.

[0151] In a preferred embodiment, the surface of the biochip and the probe may be derivatized with chemical functional groups for subsequent attachment of the two. Thus, e.g., the biochip is derivatized with a chemical functional group including, but not limited to, amino groups, carboxy groups, oxo groups and thiol groups, with amino groups being particularly preferred. Using these functional groups, the probes can be attached using functional groups on the probes. For example, nucleic acids containing amino groups can be attached to surfaces comprising amino groups, e.g. using linkers as are known in the art; e.g., homo-or hetero-bifunctional linkers as are well known (see 1994 Pierce Chemical Company catalog, technical section on cross-linkers, pages 155-200). In addition, in some cases, additional linkers, such as alkyl groups (including substituted and heteroalkyl groups) may be used.

[0152] In this embodiment, oligonucleotides are synthesized as is known in the art, and then attached to the surface of the solid support. As will be appreciated by those skilled in the art, either the 5′ or 3′ terminus may be attached to the solid support, or attachment may be via an internal nucleoside.

[0153] In another embodiment, the immobilization to the solid support may be very strong, yet non-covalent. For example, biotinylated oligonucleotides can be made, which bind to surfaces covalently coated with streptavidin, resulting in attachment.

[0154] Alternatively, the oligonucleotides may be synthesized on the surface, as is known in the art. For example, photoactivation techniques utilizing photopolymerization compounds and techniques are used. In a preferred embodiment, the nucleic acids can be synthesized in situ, using well known photolithographic techniques, such as those described in WO 95/25116; WO 95/35505; U.S. Pat. Nos. 5,700,637 and 5,445,934; and references cited within, all of which are expressly incorporated by reference; these methods of attachment form the basis of the Affimetrix GeneChip™ technology.

[0155] Often, amplification-based assays are performed to measure the expression level of prostate cancer-associated sequences. These assays are typically performed in conjunction with reverse transcription. In such assays, a prostate cancer-associated nucleic acid sequence acts as a template in an amplification reaction (e.g., Polymerase Chain Reaction, or PCR). In a quantitative amplification, the amount of amplification product will be proportional to the amount of template in the original sample. Comparison to appropriate controls provides a measure of the amount of prostate cancer-associated RNA. Methods of quantitative amplification are well known to those of skill in the art. Detailed protocols for quantitative PCR are provided, e.g., in Innis et al., PCR Protocols, A Guide to Methods and Applications (1990).

[0156] In some embodiments, a TaqMan based assay is used to measure expression. TaqMan based assays use a fluorogenic oligonucleotide probe that contains a 5′ fluorescent dye and a 3′ quenching agent. The probe hybridizes to a PCR product, but cannot itself be extended due to a blocking agent at the 3′ end. When the PCR product is amplified in subsequent cycles, the 5′ nuclease activity of the polymerase, e.g., AmpliTaq, results in the cleavage of the TaqMan probe. This cleavage separates the 5′ fluorescent dye and the 3′ quenching agent, thereby resulting in an increase in fluorescence as a function of amplification (see, e.g., literature provided by Perkin-Elmer, e.g., www2.perkin-elmer.com).

[0157] Other suitable amplification methods include, but are not limited to, ligase chain reaction (LCR) (see Wu & Wallace, Genomics 4:560 (1989), Landegren et al., Science 241:1077 (1988), and Barringer et al., Gene 89:117 (1990)), transcription amplification (Kwoh et al., Proc. Natl. Acad. Sci. USA 86:1173 (1989)), self-sustained sequence replication (Guatelli et al., Proc. Nat. Acad. Sci. USA 87:1874 (1990)), dot PCR, and linker adapter PCR, etc.

Expression of Prostate Cancer Proteins from Nucleic Acids

[0158] In a preferred embodiment, prostate cancer nucleic acids, e.g., encoding prostate cancer proteins are used to make a variety of expression vectors to express prostate cancer proteins which can then be used in screening assays, as described below. Expression vectors and recombinant DNA technology are well known to those of skill in the art (see, e.g., Ausubel, supra, and Gene Expression Systems (Fernandez & Hoeffler, eds, 1999)) and are used to express proteins. The expression vectors may be either self-replicating extrachromosomal vectors or vectors which integrate into a host genome. Generally, these expression vectors include transcriptional and translational regulatory nucleic acid operably linked to the nucleic acid encoding the prostate cancer protein. The term “control sequences” refers to DNA sequences used for the expression of an operably linked coding sequence in a particular host organism. Control sequences that are suitable for prokaryotes, e.g., include a promoter, optionally an operator sequence, and a ribosome binding site. Eukaryotic cells are known to utilize promoters, polyadenylation signals, and enhancers.

[0159] Nucleic acid is “operably linked” when it is placed into a functional relationship with another nucleic acid sequence. For example, DNA for a presequence or secretory leader is operably linked to DNA for a polypeptide if it is expressed as a preprotein that participates in the secretion of the polypeptide; a promoter or enhancer is operably linked to a coding sequence if it affects the transcription of the sequence; or a ribosome binding site is operably linked to a coding sequence if it is positioned so as to facilitate translation. Generally, “operably linked” means that the DNA sequences being linked are contiguous, and, in the case of a secretory leader, contiguous and in reading phase. However, enhancers do not have to be contiguous. Linking is typically accomplished by ligation at convenient restriction sites. If such sites do not exist, synthetic oligonucleotide adaptors or linkers are used in accordance with conventional practice. Transcriptional and translational regulatory nucleic acid will generally be appropriate to the host cell used to express the prostate cancer protein. Numerous types of appropriate expression vectors, and suitable regulatory sequences are known in the art for a variety of host cells.

[0160] In general, transcriptional and translational regulatory sequences may include, but are not limited to, promoter sequences, ribosomal binding sites, transcriptional start and stop sequences, translational start and stop sequences, and enhancer or activator sequences. In a preferred embodiment, the regulatory sequences include a promoter and transcriptional start and stop sequences.

[0161] Promoter sequences encode either constitutive or inducible promoters. The promoters may be either naturally occurring promoters or hybrid promoters. Hybrid promoters, which combine elements of more than one promoter, are also known in the art, and are useful in the present invention.

[0162] In addition, an expression vector may comprise additional elements. For example, the expression vector may have two replication systems, thus allowing it to be maintained in two organisms, e.g. in mammalian or insect cells for expression and in a procaryotic host for cloning and amplification. Furthermore, for integrating expression vectors, the expression vector contains at least one sequence homologous to the host cell genome, and preferably two homologous sequences which flank the expression construct. The integrating vector may be directed to a specific locus in the host cell by selecting the appropriate homologous sequence for inclusion in the vector. Constructs for integrating vectors are well known in the art (e.g., Fernandez & Hoeffler, supra).

[0163] In addition, in a preferred embodiment, the expression vector contains a selectable marker gene to allow the selection of transformed host cells. Selection genes are well known in the art and will vary with the host cell used.

[0164] The prostate cancer proteins of the present invention are produced by culturing a host cell transformed with an expression vector containing nucleic acid encoding a prostate cancer protein, under the appropriate conditions to induce or cause expression of the prostate cancer protein. Conditions appropriate for prostate cancer protein expression will vary with the choice of the expression vector and the host cell, and will be easily ascertained by one skilled in the art through routine experimentation or optimization. For example, the use of constitutive promoters in the expression vector will require optimizing the growth and proliferation of the host cell, while the use of an inducible promoter requires the appropriate growth conditions for induction. In addition, in some embodiments, the timing of the harvest is important. For example, the baculoviral systems used in insect cell expression are lytic viruses, and thus harvest time selection can be crucial for product yield.

[0165] Appropriate host cells include yeast, bacteria, archaebacteria, fungi, and insect and animal cells, including mammalian cells. Of particular interest are Saccharomyces cerevisiae and other yeasts, E. coli, Bacillus subtilis, Sf9 cells, C129 cells, 293 cells, Neurospora, BHK, CHO, COS, HeLa cells, HUVEC (human umbilical vein endothelial cells), THP1 cells (a macrophage cell line) and various other human cells and cell lines.

[0166] In a preferred embodiment, the prostate cancer proteins are expressed in mammalian cells. Mammalian expression systems are also known in the art, and include retroviral and adenoviral systems. One expression vector system is a retroviral vector system such as is generally described in PCT/US97/01019 and PCT/US97/01048, both of which are hereby expressly incorporated by reference. Of particular use as mammalian promoters are the promoters from mammalian viral genes, since the viral genes are often highly expressed and have a broad host range. Examples include the SV40 early promoter, mouse mammary tumor virus LTR promoter, adenovirus major late promoter, herpes simplex virus promoter, and the CMV promoter (see, e.g., Fernandez & Hoeffler, supra). Typically, transcription termination and polyadenylation sequences recognized by mammalian cells are regulatory regions located 3′ to the translation stop codon and thus, together with the promoter elements, flank the coding sequence. Examples of transcription terminator and polyadenlyation signals include those derived form SV40.

[0167] The methods of introducing exogenous nucleic acid into mammalian hosts, as well as other hosts, is well known in the art, and will vary with the host cell used. Techniques include dextran-mediated transfection, calcium phosphate precipitation, polybrene mediated transfection, protoplast fusion, electroporation, viral infection, encapsulation of the polynucleotide(s) in liposomes, and direct microinjection of the DNA into nuclei.

[0168] In a preferred embodiment, prostate cancer proteins are expressed in bacterial systems. Bacterial expression systems are well known in the art. Promoters from bacteriophage may also be used and are known in the art. In addition, synthetic promoters and hybrid promoters are also useful; e.g., the tac promoter is a hybrid of the trp and lac promoter sequences. Furthermore, a bacterial promoter can include naturally occurring promoters of non-bacterial origin that have the ability to bind bacterial RNA polymerase and initiate transcription. In addition to a functioning promoter sequence, an efficient ribosome binding site is desirable. The expression vector may also include a signal peptide sequence that provides for secretion of the prostate cancer protein in bacteria. The protein is either secreted into the growth media (gram-positive bacteria) or into the periplasmic space, located between the inner and outer membrane of the cell (gram-negative bacteria). The bacterial expression vector may also include a selectable marker gene to allow for the selection of bacterial strains that have been transformed. Suitable selection genes include genes which render the bacteria resistant to drugs such as ampicillin, chloramphenicol, erythromycin, kanamycin, neomycin and tetracycline. Selectable markers also include biosynthetic genes, such as those in the histidine, tryptophan and leucine biosynthetic pathways. These components are assembled into expression vectors. Expression vectors for bacteria are well known in the art, and include vectors for Bacillus subtilis, E. coli, Streptococcus cremoris, and Streptococcus lividans, among others (e.g., Fernandez & Hoeffler, supra). The bacterial expression vectors are transformed into bacterial host cells using techniques well known in the art, such as calcium chloride treatment, electroporation, and others.

[0169] In one embodiment, prostate cancer proteins are produced in insect cells. Expression vectors for the transformation of insect cells, and in particular, baculovirus-based expression vectors, are well known in the art.

[0170] In a preferred embodiment, prostate cancer protein is produced in yeast cells. Yeast expression systems are well known in the art, and include expression vectors for Saccharomyces cerevisiae, Candida albicans and C. maltosa, Hansenula polymorpha, Kluyveromyces fragilis and K lactis, Pichia guillerimondii and P. pastoris, Schizosaccharomyces pombe, and Yarrowia lipolytica.

[0171] The prostate cancer protein may also be made as a fusion protein, using techniques well known in the art. Thus, e.g., for the creation of monoclonal antibodies, if the desired epitope is small, the prostate cancer protein may be fused to a carrier protein to form an immunogen. Alternatively, the prostate cancer protein may be made as a fusion protein to increase expression, or for other reasons. For example, when the prostate cancer protein is a prostate cancer peptide, the nucleic acid encoding the peptide may be linked to other nucleic acid for expression purposes.

[0172] In a preferred embodiment, the prostate cancer protein is purified or isolated after expression. Prostate cancer proteins may be isolated or purified in a variety of ways known to those skilled in the art depending on what other components are present in the sample. Standard purification methods include electrophoretic, molecular, immunological and chromatographic techniques, including ion exchange, hydrophobic, affinity, and reverse-phase HPLC chromatography, and chromatofocusing. For example, the prostate cancer protein may be purified using a standard anti-prostate cancer protein antibody column. Ultrafiltration and diafiltration techniques, in conjunction with protein concentration, are also useful. For general guidance in suitable purification techniques, see Scopes, Protein Purification (1982). The degree of purification necessary will vary depending on the use of the prostate cancer protein. In some instances no purification will be necessary.

[0173] Once expressed and purified if necessary, the prostate cancer proteins and nucleic acids are useful in a number of applications. They may be used as immunoselection reagents, as vaccine reagents, as screening agents, etc.

Variants of Prostate Cancer Proteins

[0174] In one embodiment, the prostate cancer proteins are derivative or variant prostate cancer proteins as compared to the wild-type sequence. That is, as outlined more fully below, the derivative prostate cancer peptide will often contain at least one amino acid substitution, deletion or insertion, with amino acid substitutions being particularly preferred. The amino acid substitution, insertion or deletion may occur at any residue within the prostate cancer peptide.

[0175] Also included within one embodiment of prostate cancer proteins of the present invention are amino acid sequence variants. These variants typically fall into one or more of three classes: substitutional, insertional or deletional variants. These variants ordinarily are prepared by site specific mutagenesis of nucleotides in the DNA encoding the prostate cancer protein, using cassette or PCR mutagenesis or other techniques well known in the art, to produce DNA encoding the variant, and thereafter expressing the DNA in recombinant cell culture as outlined above. However, variant prostate cancer protein fragments having up to about 100-150 residues may be prepared by in vitro synthesis using established techniques. Amino acid sequence variants are characterized by the predetermined nature of the variation, a feature that sets them apart from naturally occurring allelic or interspecies variation of the prostate cancer protein amino acid sequence. The variants typically exhibit the same qualitative biological activity as the naturally occurring analogue, although variants can also be selected which have modified characteristics as will be more fully outlined below.

[0176] While the site or region for introducing an amino acid sequence variation is predetermined, the mutation per se need not be predetermined. For example, in order to optimize the performance of a mutation at a given site, random mutagenesis may be conducted at the target codon or region and the expressed prostate cancer variants screened for the optimal combination of desired activity. Techniques for making substitution mutations at predetermined sites in DNA having a known sequence are well known, e.g., M13 primer mutagenesis and PCR mutagenesis. Screening of the mutants is done using assays of prostate cancer protein activities.

[0177] Amino acid substitutions are typically of single residues; insertions usually will be on the order of from about 1 to 20 amino acids, although considerably larger insertions may be tolerated. Deletions range from about 1 to about 20 residues, although in some cases deletions may be much larger.

[0178] Substitutions, deletions, insertions or any combination thereof may be used to arrive at a final derivative. Generally these changes are done on a few amino acids to minimize the alteration of the molecule. However, larger changes may be tolerated in certain circumstances. When small alterations in the characteristics of the prostate cancer protein are desired, substitutions are generally made in accordance with the amino acid substitution relationships provided in the definition section.

[0179] The variants typically exhibit the same qualitative biological activity and will elicit the same immune response as the naturally-occurring analog, although variants also are selected to modify the characteristics of the prostate cancer proteins as needed. Alternatively, the variant may be designed such that the biological activity of the prostate cancer protein is altered. For example, glycosylation sites may be altered or removed.

[0180] Substantial changes in function or immunological identity are made by selecting substitutions that are less conservative than those described above. For example, substitutions may be made which more significantly affect: the structure of the polypeptide backbone in the area of the alteration, for example the alpha-helical or beta-sheet structure; the charge or hydrophobicity of the molecule at the target site; or the bulk of the side chain. The substitutions which in general are expected to produce the greatest changes in the polypeptide's properties are those in which (a) a hydrophilic residue, e.g. seryl or threonyl is substituted for (or by) a hydrophobic residue, e.g. leucyl, isoleucyl, phenylalanyl, valyl or alanyl; (b) a cysteine or proline is substituted for (or by) any other residue; (c) a residue having an electropositive side chain, e.g. lysyl, arginyl, or histidyl, is substituted for (or by) an electronegative residue, e.g. glutamyl or aspartyl; or (d) a residue having a bulky side chain, e.g. phenylalanine, is substituted for (or by) one not having a side chain, e.g. glycine.

[0181] Covalent modifications of prostate cancer polypeptides are included within the scope of this invention. One type of covalent modification includes reacting targeted amino acid residues of a prostate cancer polypeptide with an organic derivatizing agent that is capable of reacting with selected side chains or the N-or C-terminal residues of a prostate cancer polypeptide. Derivatization with bifunctional agents is useful, for instance, for crosslinking prostate cancer polypeptides to a water-insoluble support matrix or surface for use in the method for purifying anti-prostate cancer polypeptide antibodies or screening assays, as is more fully described below. Commonly used crosslinking agents include, e.g., 1,1-bis(diazoacetyl)-2-phenylethane, glutaraldehyde, N-hydroxysuccinimide esters, e.g., esters with 4-azidosalicylic acid, homobifunctional imidoesters, including disuccinimidyl esters such as 3,3′-dithiobis(succinimidylpropionate), bifunctional maleimides such as bis-N-maleimido-1,8-octane and agents such as methyl-3-((p-azidophenyl)dithio)propioimidate.

[0182] Other modifications include deamidation of glutaminyl and asparaginyl residues to the corresponding glutamyl and aspartyl residues, respectively, hydroxylation of proline and lysine, phosphorylation of hydroxyl groups of seryl, threonyl or tyrosyl residues, methylation of the amino groups of the lysine, arginine, and histidine side chains (Creighton, Proteins: Structure and Molecular Properties, pp. 79-86 (1983)), acetylation of the N-terminal amine, and amidation of any C-terminal carboxyl group.

[0183] Another type of covalent modification of the prostate cancer polypeptide included within the scope of this invention comprises altering the native glycosylation pattern of the polypeptide. “Altering the native glycosylation pattern” is intended for purposes herein to mean deleting one or more carbohydrate moieties found in native sequence prostate cancer polypeptide, and/or adding one or more glycosylation sites that are not present in the native sequence prostate cancer polypeptide. Glycosylation patterns can be altered in many ways. For example the use of different cell types to express prostate cancer-associated sequences can result in different glycosylation patterns.

[0184] Addition of glycosylation sites to prostate cancer polypeptides may also be accomplished by altering the amino acid sequence thereof. The alteration may be made, e.g., by the addition of, or substitution by, one or more serine or threonine residues to the native sequence prostate cancer polypeptide (for O-linked glycosylation sites). The prostate cancer amino acid sequence may optionally be altered through changes at the DNA level, particularly by mutating the DNA encoding the prostate cancer polypeptide at preselected bases such that codons are generated that will translate into the desired amino acids.

[0185] Another means of increasing the number of carbohydrate moieties on the prostate cancer polypeptide is by chemical or enzymatic coupling of glycosides to the polypeptide. Such methods are described in the art, e.g., in WO 87/05330, and in Aplin & Wriston, CRC Crit. Rev. Biochem., pp. 259-306 (1981).

[0186] Removal of carbohydrate moieties present on the prostate cancer polypeptide may be accomplished chemically or enzymatically or by mutational substitution of codons encoding for amino acid residues that serve as targets for glycosylation. Chemical deglycosylation techniques are known in the art and described, for instance, by Hakimuddin, et al., Arch. Biochem. Biophys., 259:52 (1987) and by Edge et al., Anal. Biochem., 118:131 (1981). Enzymatic cleavage of carbohydrate moieties on polypeptides can be achieved by the use of a variety of endo-and exo-glycosidases as described by Thotakura et al., Meth. Enzymol., 138:350 (1987).

[0187] Another type of covalent modification of prostate cancer comprises linking the prostate cancer polypeptide to one of a variety of nonproteinaceous polymers, e.g., polyethylene glycol, polypropylene glycol, or polyoxyalkylenes, in the manner set forth in U.S. Pat. Nos. 4,640,835; 4,496,689; 4,301,144; 4,670,417; 4,791,192 or 4,179,337.

[0188] Prostate cancer polypeptides of the present invention may also be modified in a way to form chimeric molecules comprising a prostate cancer polypeptide fused to another, heterologous polypeptide or amino acid sequence. In one embodiment, such a chimeric molecule comprises a fusion of a prostate cancer polypeptide with a tag polypeptide which provides an epitope to which an anti-tag antibody can selectively bind. The epitope tag is generally placed at the amino-or carboxyl-terminus of the prostate cancer polypeptide. The presence of such epitope-tagged forms of a prostate cancer polypeptide can be detected using an antibody against the tag polypeptide. Also, provision of the epitope tag enables the prostate cancer polypeptide to be readily purified by affinity purification using an anti-tag antibody or another type of affinity matrix that binds to the epitope tag. In an alternative embodiment, the chimeric molecule may comprise a fusion of a prostate cancer polypeptide with an immunoglobulin or a particular region of an immunoglobulin. For a bivalent form of the chimeric molecule, such a fusion could be to the Fc region of an IgG molecule.

[0189] Various tag polypeptides and their respective antibodies are well known in the art. Examples include poly-histidine (poly-his) or poly-histidine-glycine (poly-his-gly) tags; HIS6 and metal chelation tags, the flu HA tag polypeptide and its antibody 12CA5 (Field et al., Mol. Cell. Biol. 8:2159-2165 (1988)); the c-myc tag and the 8F9, 3C7, 6E10, G4, B7 and 9E10 antibodies thereto (Evan et al., Molecular and Cellular Biology 5:3610-3616 (1985)); and the Herpes Simplex virus glycoprotein D (gD) tag and its antibody (Paborsky et al., Protein Engineering 3(6):547-553 (1990)). Other tag polypeptides include the Flag-peptide (Hopp et al., BioTechnology 6:1204-1210 (1988)); the KT3 epitope peptide (Martin et al., Science 255:192-194 (1992)); tubulin epitope peptide (Skinner et al., J. Biol. Chem. 266:15163-15166 (1991)); and the T7 gene 10 protein peptide tag (Lutz-Freyermuth et al., Proc. Natl. Acad. Sci. USA 87:6393-6397 (1990)).

[0190] Also included are other prostate cancer proteins of the prostate cancer family, and prostate cancer proteins from other organisms, which are cloned and expressed as outlined below. Thus, probe or degenerate polymerase chain reaction (PCR) primer sequences may be used to find other related prostate cancer proteins from humans or other organisms. As will be appreciated by those in the art, particularly useful probe and/or PCR primer sequences include the unique areas of the prostate cancer nucleic acid sequence. As is generally known in the art, preferred PCR primers are from about 15 to about 35 nucleotides in length, with from about 20 to about 30 being preferred, and may contain inosine as needed. The conditions for the PCR reaction are well known in the art (e.g., Innis, PCR Protocols, supra).

Antibodies to Prostate Cancer Proteins

[0191] In a preferred embodiment, when the prostate cancer protein is to be used to generate antibodies, e.g., for immunotherapy or immunodiagnosis, the prostate cancer protein should share at least one epitope or determinant with the full length protein. By “epitope” or “determinant” herein is typically meant a portion of a protein which will generate and/or bind an antibody or T-cell receptor in the context of MHC. Thus, in most instances, antibodies made to a smaller prostate cancer protein will be able to bind to the full-length protein, particularly linear epitopes. In a preferred embodiment, the epitope is unique; that is, antibodies generated to a unique epitope show little or no cross-reactivity.

[0192] Methods of preparing polyclonal antibodies are known to the skilled artisan (e.g., Coligan, supra; and Harlow & Lane, supra). Polyclonal antibodies can be raised in a mammal, e.g., by one or more injections of an immunizing agent and, if desired, an adjuvant. Typically, the immunizing agent and/or adjuvant will be injected in the mammal by multiple subcutaneous or intraperitoneal injections. The immunizing agent may include a protein encoded by a nucleic acid of the figures or fragment thereof or a fusion protein thereof. It may be useful to conjugate the immunizing agent to a protein known to be immunogenic in the mammal being immunized. Examples of such immunogenic proteins include but are not limited to keyhole limpet hemocyanin, serum albumin, bovine thyroglobulin, and soybean trypsin inhibitor. Examples of adjuvants which may be employed include Freund's complete adjuvant and MPL-TDM adjuvant (monophosphoryl Lipid A, synthetic trehalose dicorynomycolate). The immunization protocol may be selected by one skilled in the art without undue experimentation.

[0193] The antibodies may, alternatively, be monoclonal antibodies. Monoclonal antibodies may be prepared using hybridoma methods, such as those described by Kohler & Milstein, Nature 256:495 (1975). In a hybridoma method, a mouse, hamster, or other appropriate host animal, is typically immunized with an immunizing agent to elicit lymphocytes that produce or are capable of producing antibodies that will specifically bind to the immunizing agent. Alternatively, the lymphocytes may be immunized in vitro. The immunizing agent will typically include a polypeptide encoded by a nucleic acid of Tables 1-16 fragment thereof, or a fusion protein thereof. Generally, either peripheral blood lymphocytes (“PBLs”) are used if cells of human origin are desired, or spleen cells or lymph node cells are used if non-human mammalian sources are desired. The lymphocytes are then fused with an immortalized cell line using a suitable fusing agent, such as polyethylene glycol, to form a hybridoma cell (Goding, Monoclonal Antibodies: Principles and Practice, pp. 59-103 (1986)). Immortalized cell lines are usually transformed mammalian cells, particularly myeloma cells of rodent, bovine and human origin. Usually, rat or mouse myeloma cell lines are employed. The hybridoma cells may be cultured in a suitable culture medium that preferably contains one or more substances that inhibit the growth or survival of the unfused, immortalized cells. For example, if the parental cells lack the enzyme hypoxanthine guanine phosphoribosyl transferase (HGPRT or HPRT), the culture medium for the hybridomas typically will include hypoxanthine, aminopterin, and thymidine (“HAT medium”), which substances prevent the growth of HGPRT-deficient cells.

[0194] In one embodiment, the antibodies are bispecific antibodies. Bispecific antibodies are monoclonal, preferably human or humanized, antibodies that have binding specificities for at least two different antigens or that have binding specificities for two epitopes on the same antigen. In one embodiment, one of the binding specificities is for a protein encoded by a nucleic acid Tables 1-16 or a fragment thereof, the other one is for any other antigen, and preferably for a cell-surface protein or receptor or receptor subunit, preferably one that is tumor specific. Alternatively, tetramer-type technology may create multivalent reagents.

[0195] In a preferred embodiment, the antibodies to prostate cancer protein are capable of reducing or eliminating a biological function of a prostate cancer protein, as is described below. That is, the addition of anti-prostate cancer protein antibodies (either polyclonal or preferably monoclonal) to prostate cancer tissue (or cells containing prostate cancer) may reduce or eliminate the prostate cancer. Generally, at least a 25% decrease in activity, growth, size or the like is preferred, with at least about 50% being particularly preferred and about a 95-100% decrease being especially preferred.

[0196] In a preferred embodiment the antibodies to the prostate cancer proteins are humanized antibodies (e.g., Xenerex Biosciences, Mederex, Inc., Abgenix, Inc., Protein Design Labs, Inc.) Humanized forms of non-human (e.g., murine) antibodies are chimeric molecules of immunoglobulins, immunoglobulin chains or fragments thereof (such as Fv, Fab, Fab′, F(ab′)₂ or other antigen-binding subsequences of antibodies) which contain minimal sequence derived from non-human immunoglobulin. Humanized antibodies include human immunoglobulins (recipient antibody) in which residues from a complementary determining region (CDR) of the recipient are replaced by residues from a CDR of a non-human species (donor antibody) such as mouse, rat or rabbit having the desired specificity, affinity and capacity. In some instances, Fv framework residues of the human immunoglobulin are replaced by corresponding non-human residues. Humanized antibodies may also comprise residues which are found neither in the recipient antibody nor in the imported CDR or framework sequences. In general, a humanized antibody will comprise substantially all of at least one, and typically two, variable domains, in which all or substantially all of the CDR regions correspond to those of a non-human immunoglobulin and all or substantially all of the framework (FR) regions are those of a human immunoglobulin consensus sequence. The humanized antibody optimally also will comprise at least a portion of an immunoglobulin constant region (Fc), typically that of a human immunoglobulin (Jones et al., Nature 321:522-525 (1986); Riechmann et al., Nature 332:323-329 (1988); and Presta, Curr. Op. Struct. Biol. 2:593-596 (1992)). Humanization can be essentially performed following the method of Winter and co-workers (Jones et al., Nature 321:522-525 (1986); Riechmann et al., Nature 332:323-327 (1988); Verhoeyen et al., Science 239:1534-1536 (1988)), by substituting rodent CDRs or CDR sequences for the corresponding sequences of a human antibody. Accordingly, such humanized antibodies are chimeric antibodies (U.S. Pat. No. 4,816,567), wherein substantially less than an intact human variable domain has been substituted by the corresponding sequence from a non-human species.

[0197] Human antibodies can also be produced using various techniques known in the art, including phage display libraries (Hoogenboom & Winter, J. Mol. Biol. 227:381 (1991); Marks et al., J. Mol. Biol. 222:581 (1991)). The techniques of Cole et al. and Boerner et al. are also available for the preparation of human monoclonal antibodies (Cole et al., Monoclonal Antibodies and Cancer Therapy, p. 77 (1985) and Boerner et al., J. Immunol. 147(1):86-95 (1991)). Similarly, human antibodies can be made by introducing of human immunoglobulin loci into transgenic animals, e.g., mice in which the endogenous immunoglobulin genes have been partially or completely inactivated. Upon challenge, human antibody production is observed, which closely resembles that seen in humans in all respects, including gene rearrangement, assembly, and antibody repertoire. This approach is described, e.g., in U.S. Pat. Nos. 5,545,807; 5,545,806; 5,569,825; 5,625,126; 5,633,425; 5,661,016, and in the following scientific publications: Marks et al., Bio/Technology 10:779-783 (1992); Lonberg et al., Nature 368:856-859 (1994); Morrison, Nature 368:812-13 (1994); Fishwild et al., Nature Biotechnology 14:845-51 (1996); Neuberger, Nature Biotechnology 14:826 (1996); Lonberg & Huszar, Intern. Rev. Immunol. 13:65-93 (1995).

[0198] By immunotherapy is meant treatment of prostate cancer with an antibody raised against prostate cancer proteins. As used herein, immunotherapy can be passive or active. Passive immunotherapy as defined herein is the passive transfer of antibody to a recipient (patient). Active immunization is the induction of antibody and/or T-cell responses in a recipient (patient). Induction of an immune response is the result of providing the recipient with an antigen to which antibodies are raised. As appreciated by one of ordinary skill in the art, the antigen may be provided by injecting a polypeptide against which antibodies are desired to be raised into a recipient, or contacting the recipient with a nucleic acid capable of expressing the antigen and under conditions for expression of the antigen, leading to an immune response.

[0199] In a preferred embodiment the prostate cancer proteins against which antibodies are raised are secreted proteins as described above. Without being bound by theory, antibodies used for treatment, bind and prevent the secreted protein from binding to its receptor, thereby inactivating the secreted prostate cancer protein.

[0200] In another preferred embodiment, the prostate cancer protein to which antibodies are raised is a transmembrane protein. Without being bound by theory, antibodies used for treatment, bind the extracellular domain of the prostate cancer protein and prevent it from binding to other proteins, such as circulating ligands or cell-associated molecules. The antibody may cause down-regulation of the transmembrane prostate cancer protein. As will be appreciated by one of ordinary skill in the art, the antibody may be a competitive, non-competitive or uncompetitive inhibitor of protein binding to the extracellular domain of the prostate cancer protein. The antibody is also an antagonist of the prostate cancer protein. Further, the antibody prevents activation of the transmembrane prostate cancer protein. In one aspect, when the antibody prevents the binding of other molecules to the prostate cancer protein, the antibody prevents growth of the cell. The antibody may also be used to target or sensitize the cell to cytotoxic agents, including, but not limited to TNF-α, TNF-β, IL-1, INF-γ and IL-2, or chemotherapeutic agents including 5FU, vinblastine, actinomycin D, cisplatin, methotrexate, and the like. In some instances the antibody belongs to a sub-type that activates serum complement when complexed with the transmembrane protein thereby mediating cytotoxicity or antigen-dependent cytotoxicity (ADCC). Thus, prostate cancer is treated by administering to a patient antibodies directed against the transmembrane prostate cancer protein. Antibody-labeling may activate a co-toxin, localize a toxin payload, or otherwise provide means to locally ablate cells.

[0201] In another preferred embodiment, the antibody is conjugated to an effector moiety. The effector moiety can be any number of molecules, including labelling moieties such as radioactive labels or fluorescent labels, or can be a therapeutic moiety. In one aspect the therapeutic moiety is a small molecule that modulates the activity of the prostate cancer protein. In another aspect the therapeutic moiety modulates the activity of molecules associated with or in close proximity to the prostate cancer protein. The therapeutic moiety may inhibit enzymatic activity such as protease or collagenase or protein kinase activity associated with prostate cancer.

[0202] In a preferred embodiment, the therapeutic moiety can also be a cytotoxic agent. In this method, targeting the cytotoxic agent to prostate cancer tissue or cells, results in a reduction in the number of afflicted cells, thereby reducing symptoms associated with prostate cancer. Cytotoxic agents are numerous and varied and include, but are not limited to, cytotoxic drugs or toxins or active fragments of such toxins. Suitable toxins and their corresponding fragments include diphtheria A chain, exotoxin A chain, ricin A chain, abrin A chain, curcin, crotin, phenomycin, enomycin and the like. Cytotoxic agents also include radiochemicals made by conjugating radioisotopes to antibodies raised against prostate cancer proteins, or binding of a radionuclide to a chelating agent that has been covalently attached to the antibody. Targeting the therapeutic moiety to transmembrane prostate cancer proteins not only serves to increase the local concentration of therapeutic moiety in the prostate cancer afflicted area, but also serves to reduce deleterious side effects that may be associated with the therapeutic moiety.

[0203] In another preferred embodiment, the prostate cancer protein against which the antibodies are raised is an intracellular protein. In this case, the antibody may be conjugated to a protein which facilitates entry into the cell. In one case, the antibody enters the cell by endocytosis. In another embodiment, a nucleic acid encoding the antibody is administered to the individual or cell. Moreover, wherein the prostate cancer protein can be targeted within a cell, i.e., the nucleus, an antibody thereto contains a signal for that target localization, i.e., a nuclear localization signal.

[0204] The prostate cancer antibodies of the invention specifically bind to prostate cancer proteins. By “specifically bind” herein is meant that the antibodies bind to the protein with a K_{d} of at least about 0.1 mM, more usually at least about 1 μM, preferably at least about 0.1 μM or better, and most preferably, 0.01 μM or better. Selectivity of binding is also important.

Detection of Prostate Cancer Sequence for Diagnostic and Therapeutic Applications

[0205] In one aspect, the RNA expression levels of genes are determined for different cellular states in the prostate cancer phenotype. Expression levels of genes in normal tissue (i.e., not undergoing prostate cancer) and in prostate cancer tissue (and in some cases, for varying severities of prostate cancer that relate to prognosis, as outlined below) are evaluated to provide expression profiles. An expression profile of a particular cell state or point of development is essentially a “fingerprint” of the state. While two states may have any particular gene similarly expressed, the evaluation of a number of genes simultaneously allows the generation of a gene expression profile that is reflective of the state of the cell. By comparing expression profiles of cells in different states, information regarding which genes are important (including both up- and down-regulation of genes) in each of these states is obtained. Then, diagnosis may be performed or confirmed to determine whether a tissue sample has the gene expression profile of normal or cancerous tissue. This will provide for molecular diagnosis of related conditions.

[0206] “Differential expression,” or grammatical equivalents as used herein, refers to qualitative or quantitative differences in the temporal and/or cellular gene expression patterns within and among cells and tissue. Thus, a differentially expressed gene can qualitatively have its expression altered, including an activation or inactivation, in, e.g., normal versus prostate cancer tissue. Genes may be turned on or turned off in a particular state, relative to another state thus permitting comparison of two or more states. A qualitatively regulated gene will exhibit an expression pattern within a state or cell type which is detectable by standard techniques. Some genes will be expressed in one state or cell type, but not in both. Alternatively, the difference in expression may be quantitative, e.g., in that expression is increased or decreased; i.e., gene expression is either upregulated, resulting in an increased amount of transcript, or downregulated, resulting in a decreased amount of transcript. The degree to which expression differs need only be large enough to quantify via standard characterization techniques as outlined below, such as by use of Affymetrix GeneChip™ expression arrays, Lockhart, Nature Biotechnology 14:1675-1680 (1996), hereby expressly incorporated by reference. Other techniques include, but are not limited to, quantitative reverse transcriptase PCR, northern analysis and RNase protection. As outlined above, preferably the change in expression (i.e., upregulation or downregulation) is at least about 50%, more preferably at least about 100%, more preferably at least about 150%, more preferably at least about 200%, with from 300 to at least 1000% being especially preferred.

[0207] Evaluation may be at the gene transcript, or the protein level. The amount of gene expression may be monitored using nucleic acid probes to the DNA or RNA equivalent of the gene transcript, and the quantification of gene expression levels, or, alternatively, the final gene product itself (protein) can be monitored, e.g., with antibodies to the prostate cancer protein and standard immunoassays (ELISAs, etc.) or other techniques, including mass spectroscopy assays, 2D gel electrophoresis assays, etc. Proteins corresponding to prostate cancer genes, i.e., those identified as being important in a prostate cancer phenotype, can be evaluated in a prostate cancer diagnostic test.

[0208] In a preferred embodiment, gene expression monitoring is performed simultaneously on a number of genes. Multiple protein expression monitoring can be performed as well. Similarly, these assays may be performed on an individual basis as well.

[0209] In this embodiment, the prostate cancer nucleic acid probes are attached to biochips as outlined herein for the detection and quantification of prostate cancer sequences in a particular cell. The assays are further described below in the example. PCR techniques can be used to provide greater sensitivity.

[0210] In a preferred embodiment nucleic acids encoding the prostate cancer protein are detected. Although DNA or RNA encoding the prostate cancer protein may be detected, of particular interest are methods wherein an mRNA encoding a prostate cancer protein is detected. Probes to detect mRNA can be a nucleotide/deoxynucleotide probe that is complementary to and hybridizes with the mRNA and includes, but is not limited to, oligonucleotides, cDNA or RNA. Probes also should contain a detectable label, as defined herein. In one method the mRNA is detected after immobilizing the nucleic acid to be examined on a solid support such as nylon membranes and hybridizing the probe with the sample. Following washing to remove the non-specifically bound probe, the label is detected. In another method detection of the mRNA is performed in situ. In this method permeabilized cells or tissue samples are contacted with a detectably labeled nucleic acid probe for sufficient time to allow the probe to hybridize with the target mRNA. Following washing to remove the non-specifically bound probe, the label is detected. For example a digoxygenin labeled riboprobe (RNA probe) that is complementary to the mRNA encoding a prostate cancer protein is detected by binding the digoxygenin with an anti-digoxygenin secondary antibody and developed with nitro blue tetrazolium and 5-bromo-4-chloro-3-indoyl phosphate.

[0211] In a preferred embodiment, various proteins from the three classes of proteins as described herein (secreted, transmembrane or intracellular proteins) are used in diagnostic assays. The prostate cancer proteins, antibodies, nucleic acids, modified proteins and cells containing prostate cancer sequences are used in diagnostic assays. This can be performed on an individual gene or corresponding polypeptide level. In a preferred embodiment, the expression profiles are used, preferably in conjunction with high throughput screening techniques to allow monitoring for expression profile genes and/or corresponding polypeptides.

[0212] As described and defined herein, prostate cancer proteins, including intracellular, transmembrane or secreted proteins, find use as markers of prostate cancer. Detection of these proteins in putative prostate cancer tissue allows for detection or diagnosis of prostate cancer. In one embodiment, antibodies are used to detect prostate cancer proteins. A preferred method separates proteins from a sample by electrophoresis on a gel (typically a denaturing and reducing protein gel, but may be another type of gel, including isoelectric focusing gels and the like). Following separation of proteins, the prostate cancer protein is detected, e.g., by immunoblotting with antibodies raised against the prostate cancer protein. Methods of immunoblotting are well known to those of ordinary skill in the art.

[0213] In another preferred method, antibodies to the prostate cancer protein find use in in situ imaging techniques, e.g., in histology (e.g., Methods in Cell Biology: Antibodies in Cell Biology, volume 37 (Asai, ed. 1993)). In this method cells are contacted with from one to many antibodies to the prostate cancer protein(s). Following washing to remove non-specific antibody binding, the presence of the antibody or antibodies is detected. In one embodiment the antibody is detected by incubating with a secondary antibody that contains a detectable label. In another method the primary antibody to the prostate cancer protein(s) contains a detectable label, e.g. an enzyme marker that can act on a substrate. In another preferred embodiment each one of multiple primary antibodies contains a distinct and detectable label. This method finds particular use in simultaneous screening for a plurality of prostate cancer proteins. As will be appreciated by one of ordinary skill in the art, many other histological imaging techniques are also provided by the invention.

[0214] In a preferred embodiment the label is detected in a fluorometer which has the ability to detect and distinguish emissions of different wavelengths. In addition, a fluorescence activated cell sorter (FACS) can be used in the method.

[0215] In another preferred embodiment, antibodies find use in diagnosing prostate cancer from blood, serum, plasma, stool, and other samples. Such samples, therefore, are useful as samples to be probed or tested for the presence of prostate cancer proteins. Antibodies can be used to detect a prostate cancer protein by previously described immunoassay techniques including ELISA, immunoblotting (western blotting), immunoprecipitation, BIACORE technology and the like. Conversely, the presence of antibodies may indicate an immune response against an endogenous prostate cancer protein.

[0216] In a preferred embodiment, in situ hybridization of labeled prostate cancer nucleic acid probes to tissue arrays is done. For example, arrays of tissue samples, including prostate cancer tissue and/or normal tissue, are made. In situ hybridization (see, e.g., Ausubel, supra) is then performed. When comparing the fingerprints between an individual and a standard, the skilled artisan can make a diagnosis, a prognosis, or a prediction based on the findings. It is further understood that the genes which indicate the diagnosis may differ from those which indicate the prognosis and molecular profiling of the condition of the cells may lead to distinctions between responsive or refractory conditions or may be predictive of outcomes.

[0217] In a preferred embodiment, the prostate cancer proteins, antibodies, nucleic acids, modified proteins and cells containing prostate cancer sequences are used in prognosis assays. As above, gene expression profiles can be generated that correlate to prostate cancer, in terms of long term prognosis. Again, this may be done on either a protein or gene level, with the use of genes being preferred. As above, prostate cancer probes may be attached to biochips for the detection and quantification of prostate cancer sequences in a tissue or patient. The assays proceed as outlined above for diagnosis. PCR method may provide more sensitive and accurate quantification.

Assays for Therapeutic Compounds

[0218] In a preferred embodiment members of the proteins, nucleic acids, and antibodies as described herein are used in drug screening assays. The prostate cancer proteins, antibodies, nucleic acids, modified proteins and cells containing prostate cancer sequences are used in drug screening assays or by evaluating the effect of drug candidates on a “gene expression profile” or expression profile of polypeptides. In a preferred embodiment, the expression profiles are used, preferably in conjunction with high throughput screening techniques to allow monitoring for expression profile genes after treatment with a candidate agent (e.g., Zlokarnik, et al., Science 279:84-8 (1998); Heid, Genome Res 6:986-94, 1996).

[0219] In a preferred embodiment, the prostate cancer proteins, antibodies, nucleic acids, modified proteins and cells containing the native or modified prostate cancer proteins are used in screening assays. That is, the present invention provides novel methods for screening for compositions which modulate the prostate cancer phenotype or an identified physiological function of a prostate cancer protein. As above, this can be done on an individual gene level or by evaluating the effect of drug candidates on a “gene expression profile”. In a preferred embodiment, the expression profiles are used, preferably in conjunction with high throughput screening techniques to allow monitoring for expression profile genes after treatment with a candidate agent, see Zlokarnik, supra.

[0220] Having identified the differentially expressed genes herein, a variety of assays may be executed. In a preferred embodiment, assays may be run on an individual gene or protein level. That is, having identified a particular gene as up regulated in prostate cancer, test compounds can be screened for the ability to modulate gene expression or for binding to the prostate cancer protein. “Modulation” thus includes both an increase and a decrease in gene expression. The preferred amount of modulation will depend on the original change of the gene expression in normal versus tissue undergoing prostate cancer, with changes of at least 10%, preferably 50%, more preferably 100-300%, and in some embodiments 300-1000% or greater. Thus, if a gene exhibits a 4-fold increase in prostate cancer tissue compared to normal tissue, a decrease of about four-fold is often desired; similarly, a 10-fold decrease in prostate cancer tissue compared to normal tissue often provides a target value of a 10-fold increase in expression to be induced by the test compound.

[0221] The amount of gene expression may be monitored using nucleic acid probes and the quantification of gene expression levels, or, alternatively, the gene product itself can be monitored, e.g., through the use of antibodies to the prostate cancer protein and standard immunoassays. Proteomics and separation techniques may also allow quantification of expression.

[0222] In a preferred embodiment, gene expression or protein monitoring of a number of entities, i.e., an expression profile, is monitored simultaneously. Such profiles will typically involve a plurality of those entities described herein.

[0223] In this embodiment, the prostate cancer nucleic acid probes are attached to biochips as outlined herein for the detection and quantification of prostate cancer sequences in a particular cell. Alternatively, PCR may be used. Thus, a series, e.g., of microtiter plate, may be used with dispensed primers in desired wells. A PCR reaction can then be performed and analyzed for each well.

[0224] Expression monitoring can be performed to identify compounds that modify the expression of one or more prostate cancer-associated sequences, e.g., a polynucleotide sequence set out in Tables 1-16. Generally, in a preferred embodiment, a test modulator is added to the cells prior to analysis. Moreover, screens are also provided to identify agents that modulate prostate cancer, modulate prostate cancer proteins, bind to a prostate cancer protein, or interfere with the binding of a prostate cancer protein and an antibody or other binding partner.

[0225] The term “test compound” or “drug candidate” or “modulator” or grammatical equivalents as used herein describes any molecule, e.g., protein, oligopeptide, small organic molecule, polysaccharide, polynucleotide, etc., to be tested for the capacity to directly or indirectly alter the prostate cancer phenotype or the expression of a prostate cancer sequence, e.g., a nucleic acid or protein sequence. In preferred embodiments, modulators alter expression profiles, or expression profile nucleic acids or proteins provided herein. In one embodiment, the modulator suppresses a prostate cancer phenotype, e.g. to a normal tissue fingerprint. In another embodiment, a modulator induced a prostate cancer phenotype. Generally, a plurality of assay mixtures are run in parallel with different agent concentrations to obtain a differential response to the various concentrations. Typically, one of these concentrations serves as a negative control, i.e., at zero concentration or below the level of detection.

[0226] Drug candidates encompass numerous chemical classes, though typically they are organic molecules, preferably small organic compounds having a molecular weight of more than 100 and less than about 2,500 daltons. Preferred small molecules are less than 2000, or less than 1500 or less than 1000 or less than 500 D. Candidate agents comprise functional groups necessary for structural interaction with proteins, particularly hydrogen bonding, and typically include at least an amine, carbonyl, hydroxyl or carboxyl group, preferably at least two of the functional chemical groups. The candidate agents often comprise cyclical carbon or heterocyclic structures and/or aromatic or polyaromatic structures substituted with one or more of the above functional groups. Candidate agents are also found among biomolecules including peptides, saccharides, fatty acids, steroids, purines, pyrimidines, derivatives, structural analogs or combinations thereof. Particularly preferred are peptides.

[0227] In one aspect, a modulator will neutralize the effect of a prostate cancer protein. By “neutralize” is meant that activity of a protein is inhibited or blocked and the consequent effect on the cell.

[0228] In certain embodiments, combinatorial libraries of potential modulators will be screened for an ability to bind to a prostate cancer polypeptide or to modulate activity. Conventionally, new chemical entities with useful properties are generated by identifying a chemical compound (called a “lead compound”) with some desirable property or activity, e.g., inhibiting activity, creating variants of the lead compound, and evaluating the property and activity of those variant compounds. Often, high throughput screening (HTS) methods are employed for such an analysis.

[0229] In one preferred embodiment, high throughput screening methods involve providing a library containing a large number of potential therapeutic compounds (candidate compounds). Such “combinatorial chemical libraries” are then screened in one or more assays to identify those library members (particular chemical species or subclasses) that display a desired characteristic activity. The compounds thus identified can serve as conventional “lead compounds” or can themselves be used as potential or actual therapeutics.

[0230] A combinatorial chemical library is a collection of diverse chemical compounds generated by either chemical synthesis or biological synthesis by combining a number of chemical “building blocks” such as reagents. For example, a linear combinatorial chemical library, such as a polypeptide (e.g., mutein) library, is formed by combining a set of chemical building blocks called amino acids in every possible way for a given compound length (i.e., the number of amino acids in a polypeptide compound). Millions of chemical compounds can be synthesized through such combinatorial mixing of chemical building blocks (Gallop et al., J. Med. Chem. 37(9):1233-1251 (1994)).

[0231] Preparation and screening of combinatorial chemical libraries is well known to those of skill in the art. Such combinatorial chemical libraries include, but are not limited to, peptide libraries (see, e.g., U.S. Pat. No. 5,010,175, Furka, Pept. Prot. Res. 37:487-493 (1991), Houghton et al., Nature, 354:84-88 (1991)), peptoids (PCT Publication No WO 91/19735), encoded peptides (PCT Publication WO 93/20242), random bio-oligomers (PCT Publication WO 92/00091), benzodiazepines (U.S. Pat. No. 5,288,514), diversomers such as hydantoins, benzodiazepines and dipeptides (Hobbs et al., Proc. Nat. Acad. Sci. USA 90:6909-6913 (1993)), vinylogous polypeptides (Hagihara et al., J. Amer. Chem. Soc. 114:6568 (1992)), nonpeptidal peptidomimetics with a Beta-D-Glucose scaffolding (Hirschmann et al., J. Amer. Chem. Soc. 114:9217-9218 (1992)), analogous organic syntheses of small compound libraries (Chen et al., J. Amer. Chem. Soc. 116:2661 (1994)), oligocarbamates (Cho, et al., Science 261:1303 (1993)), and/or peptidyl phosphonates (Campbell et al., J. Org. Chem. 59:658 (1994)). See, generally, Gordon et al., J. Med. Chem. 37:1385 (1994), nucleic acid libraries (see, e.g., Strategene, Corp.), peptide nucleic acid libraries (see, e.g., U.S. Pat. No. 5,539,083), antibody libraries (see, e.g., Vaughn et al., Nature Biotechnology 14(3):309-314 (1996), and PCT/US96/10287), carbohydrate libraries (see, e.g., Liang et al., Science 274:1520-1522 (1996), and U.S. Pat. No. 5,593,853), and small organic molecule libraries (see, e.g., benzodiazepines, Baum, C&EN, January 18, page 33 (1993); isoprenoids, U.S. Pat. No. 5,569,588; thiazolidinones and metathiazanones, U.S. Pat. No. 5,549,974; pyrrolidines, U.S. Pat. Nos. 5,525,735 and 5,519,134; morpholino compounds, U.S. Pat. No. 5,506,337; benzodiazepines, U.S. Pat. No. 5,288,514; and the like).

[0232] Devices for the preparation of combinatorial libraries are commercially available (see, e.g., 357 MPS, 390 MPS, Advanced Chem Tech, Louisville Ky., Symphony, Rainin, Woburn, Mass., 433A Applied Biosystems, Foster City, Calif., 9050 Plus, Millipore, Bedford, Mass.).

[0233] A number of well known robotic systems have also been developed for solution phase chemistries. These systems include automated workstations like the automated synthesis apparatus developed by Takeda Chemical Industries, LTD. (Osaka, Japan) and many robotic systems utilizing robotic arms (Zymate II, Zymark Corporation, Hopkinton, Mass.; Orca, Hewleff-Packard, Palo Alto, Calif.), which mimic the manual synthetic operations performed by a chemist. Any of the above devices are suitable for use with the present invention. The nature and implementation of modifications to these devices (if any) so that they can operate as discussed herein will be apparent to persons skilled in the relevant art. In addition, numerous combinatorial libraries are themselves commercially available (see, e.g., ComGenex, Princeton, N.J., Asinex, Moscow, Ru, Tripos, Inc., St. Louis, Mo., ChemStar, Ltd, Moscow, RU, 3D Pharmaceuticals, Exton, Pa., Martek Biosciences, Columbia, Md., etc.).

[0234] The assays to identify modulators are amenable to high throughput screening. Preferred assays thus detect enhancement or inhibition of prostate cancer gene transcription, inhibition or enhancement of polypeptide expression, and inhibition or enhancement of polypeptide activity.

[0235] High throughput assays for the presence, absence, quantification, or other properties of particular nucleic acids or protein products are well known to those of skill in the art. Similarly, binding assays and reporter gene assays are similarly well known. Thus, e.g., U.S. Pat. No. 5,559,410 discloses high throughput screening methods for proteins, U.S. Pat. No. 5,585,639 discloses high throughput screening methods for nucleic acid binding (i.e., in arrays), while U.S. Pat. Nos. 5,576,220 and 5,541,061 disclose high throughput methods of screening for ligand/antibody binding.

[0236] In addition, high throughput screening systems are commercially available (see, e.g., Zymark Corp., Hopkinton, Mass.; Air Technical Industries, Mentor, Ohio; Beckman Instruments, Inc. Fullerton, Calif.; Precision Systems, Inc., Natick, Mass., etc.). These systems typically automate entire procedures, including all sample and reagent pipetting, liquid dispensing, timed incubations, and final readings of the microplate in detector(s) appropriate for the assay. These configurable systems provide high throughput and rapid start up as well as a high degree of flexibility and customization. The manufacturers of such systems provide detailed protocols for various high throughput systems. Thus, e.g., Zymark Corp. provides technical bulletins describing screening systems for detecting the modulation of gene transcription, ligand binding, and the like.

[0237] In one embodiment, modulators are proteins, often naturally occurring proteins or fragments of naturally occurring proteins. Thus, e.g., cellular extracts containing proteins, or random or directed digests of proteinaceous cellular extracts, may be used. In this way libraries of proteins may be made for screening in the methods of the invention. Particularly preferred in this embodiment are libraries of bacterial, fungal, viral, and mammalian proteins, with the latter being preferred, and human proteins being especially preferred. Particularly useful test compound will be directed to the class of proteins to which the target belongs, e.g., substrates for enzymes or ligands and receptors.

[0238] In a preferred embodiment, modulators are peptides of from about 5 to about 30 amino acids, with from about 5 to about 20 amino acids being preferred, and from about 7 to about 15 being particularly preferred. The peptides may be digests of naturally occurring proteins as is outlined above, random peptides, or “biased” random peptides. By “randomized” or grammatical equivalents herein is meant that each nucleic acid and peptide consists of essentially random nucleotides and amino acids, respectively. Since generally these random peptides (or nucleic acids, discussed below) are chemically synthesized, they may incorporate any nucleotide or amino acid at any position. The synthetic process can be designed to generate randomized proteins or nucleic acids, to allow the formation of all or most of the possible combinations over the length of the sequence, thus forming a library of randomized candidate bioactive proteinaceous agents.

[0239] In one embodiment, the library is fully randomized, with no sequence preferences or constants at any position. In a preferred embodiment, the library is biased. That is, some positions within the sequence are either held constant, or are selected from a limited number of possibilities. For example, in a preferred embodiment, the nucleotides or amino acid residues are randomized within a defined class, e.g., of hydrophobic amino acids, hydrophilic residues, sterically biased (either small or large) residues, towards the creation of nucleic acid binding domains, the creation of cysteines, for cross-linking, prolines for SH-3 domains, serines, threonines, tyrosines or histidines for phosphorylation sites, etc., or to purines, etc.

[0240] Modulators of prostate cancer can also be nucleic acids, as defined below. As described above generally for proteins, nucleic acid modulating agents may be naturally occurring nucleic acids, random nucleic acids, or “biased” random nucleic acids. For example, digests of procaryotic or eucaryotic genomes may be used as is outlined above for proteins.

[0241] In certain embodiments, the activity of a prostate cancer-associated protein is down-regulated, or entirely inhibited, by the use of antisense polynucleotide, i.e., a nucleic acid complementary to, and which can preferably hybridize specifically to, a coding mRNA nucleic acid sequence, e.g., a prostate cancer protein mRNA, or a subsequence thereof. Binding of the antisense polynucleotide to the mRNA reduces the translation and/or stability of the mRNA.

[0242] In the context of this invention, antisense polynucleotides can comprise naturally-occurring nucleotides, or synthetic species formed from naturally-occurring subunits or their close homologs. Antisense polynucleotides may also have altered sugar moieties or inter-sugar linkages. Exemplary among these are the phosphorothioate and other sulfur containing species which are known for use in the art. Analogs are comprehended by this invention so long as they function effectively to hybridize with the prostate cancer protein mRNA. See, e.g., Isis Pharmaceuticals, Carlsbad, Calif.; Sequitor, Inc., Natick, Mass.

[0243] Such antisense polynucleotides can readily be synthesized using recombinant means, or can be synthesized in vitro. Equipment for such synthesis is sold by several vendors, including Applied Biosystems. The preparation of other oligonucleotides such as phosphorothioates and alkylated derivatives is also well known to those of skill in the art.

[0244] Antisense molecules as used herein include antisense or sense oligonucleotides. Sense oligonucleotides can, e.g., be employed to block transcription by binding to the anti-sense strand. The antisense and sense oligonucleotide comprise a single-stranded nucleic acid sequence (either RNA or DNA) capable of binding to target mRNA (sense) or DNA (antisense) sequences for prostate cancer molecules. Antisense or sense oligonucleotides, according to the present invention, comprise a fragment generally at least about 14 nucleotides, preferably from about 14 to 30 nucleotides. The ability to derive an antisense or a sense oligonucleotide, based upon a cDNA sequence encoding a given protein is described in, e.g., Stein & Cohen (Cancer Res. 48:2659 (1988 and van der Krol et al (BioTechniques 6:958 (1988)).

[0245] In addition to antisense polynucleotides, ribozymes can be used to target and inhibit transcription of prostate cancer-associated nucleotide sequences. A ribozyme is an RNA molecule that catalytically cleaves other RNA molecules. Different kinds of ribozymes have been described, including group I ribozymes, hammerhead ribozymes, hairpin ribozymes, RNase P, and axhead ribozymes (see, e.g., Castanotto et al., Adv. in Pharmacology 25: 289-317 (1994) for a general review of the properties of different ribozymes).

[0246] The general features of hairpin ribozymes are described, e.g., in Hampel et al., Nucl. Acids Res. 18:299-304 (1990); European Patent Publication No. 0 360 257; U.S. Pat. No. 5,254,678. Methods of preparing are well known to those of skill in the art (see, e.g., WO 94/26877; Ojwang et al., Proc. Natl. Acad. Sci. USA 90:6340-6344 (1993); Yamada et al., Human Gene Therapy 1:39-45 (1994); Leavitt et al., Proc. Natl. Acad. Sci. USA 92:699-703 (1995); Leavitt et al., Human Gene Therapy 5:1151-120 (1994); and Yamada et al., Virology 205: 121-126 (1994)).

[0247] Polynucleotide modulators of prostate cancer may be introduced into a cell containing the target nucleotide sequence by formation of a conjugate with a ligand binding molecule, as described in WO 91/04753. Suitable ligand binding molecules include, but are not limited to, cell surface receptors, growth factors, other cytokines, or other ligands that bind to cell surface receptors. Preferably, conjugation of the ligand binding molecule does not substantially interfere with the ability of the ligand binding molecule to bind to its corresponding molecule or receptor, or block entry of the sense or antisense oligonucleotide or its conjugated version into the cell. Alternatively, a polynucleotide modulator of prostate cancer may be introduced into a cell containing the target nucleic acid sequence, e.g., by formation of an polynucleotide-lipid complex, as described in WO 90/10448. It is understood that the use of antisense molecules or knock out and knock in models may also be used in screening assays as discussed above, in addition to methods of treatment.

[0248] As noted above, gene expression monitoring is conveniently used to test candidate modultors (e.g., protein, nucleic acid or small molecule). After the candidate agent has been added and the cells allowed to incubate for some period of time, the sample containing a target sequence to be analyzed is added to the biochip. If required, the target sequence is prepared using known techniques. For example, the sample may be treated to lyse the cells, using known lysis buffers, electroporation, etc., with purification and/or amplification such as PCR performed as appropriate. For example, an in vitro transcription with labels covalently attached to the nucleotides is performed. Generally, the nucleic acids are labeled with biotin-FITC or PE, or with cy3 or cy5.

[0249] In a preferred embodiment, the target sequence is labeled with, e.g., a fluorescent, a chemiluminescent, a chemical, or a radioactive signal, to provide a means of detecting the target sequence's specific binding to a probe. The label also can be an enzyme, such as, alkaline phosphatase or horseradish peroxidase, which when provided with an appropriate substrate produces a product that can be detected. Alternatively, the label can be a labeled compound or small molecule, such as an enzyme inhibitor, that binds but is not catalyzed or altered by the enzyme. The label also can be a moiety or compound, such as, an epitope tag or biotin which specifically binds to streptavidin. For the example of biotin, the streptavidin is labeled as described above, thereby, providing a detectable signal for the bound target sequence. Unbound labeled streptavidin is typically removed prior to analysis.

[0250] As will be appreciated by those in the art, these assays can be direct hybridization assays or can comprise “sandwich assays”, which include the use of multiple probes, as is generally outlined in U.S. Pat. Nos. 5,681,702, 5,597,909, 5,545,730, 5,594,117, 5,591,584, 5,571,670, 5,580,731, 5,571,670, 5,591,584, 5,624,802, 5,635,352, 5,594,118, 5,359,100, 5,124,246 and 5,681,697, all of which are hereby incorporated by reference. In this embodiment, in general, the target nucleic acid is prepared as outlined above, and then added to the biochip comprising a plurality of nucleic acid probes, under conditions that allow the formation of a hybridization complex.

[0251] A variety of hybridization conditions may be used in the present invention, including high, moderate and low stringency conditions as outlined above. The assays are generally run under stringency conditions which allows formation of the label probe hybridization complex only in the presence of target. Stringency can be controlled by altering a step parameter that is a thermodynamic variable, including, but not limited to, temperature, formamide concentration, salt concentration, chaotropic salt concentration pH, organic solvent concentration, etc.

[0252] These parameters may also be used to control non-specific binding, as is generally outlined in U.S. Pat. No. 5,681,697. Thus it may be desirable to perform certain steps at higher stringency conditions to reduce non-specific binding.

[0253] The reactions outlined herein may be accomplished in a variety of ways. Components of the reaction may be added simultaneously, or sequentially, in different orders, with preferred embodiments outlined below. In addition, the reaction may include a variety of other reagents. These include salts, buffers, neutral proteins, e.g. albumin, detergents, etc. which may be used to facilitate optimal hybridization and detection, and/or reduce non-specific or background interactions. Reagents that otherwise improve the efficiency of the assay, such as protease inhibitors, nuclease inhibitors, anti-microbial agents, etc., may also be used as appropriate, depending on the sample preparation methods and purity of the target.

[0254] The assay data are analyzed to determine the expression levels, and changes in expression levels as between states, of individual genes, forming a gene expression profile.

[0255] Screens are performed to identify modulators of the prostate cancer phenotype. In one embodiment, screening is performed to identify modulators that can induce or suppress a particular expression profile, thus preferably generating the associated phenotype. In another embodiment, e.g., for diagnostic applications, having identified differentially expressed genes important in a particular state, screens can be performed to identify modulators that alter expression of individual genes. In an another embodiment, screening is performed to identify modulators that alter a biological function of the expression product of a differentially expressed gene. Again, having identified the importance of a gene in a particular state, screens are performed to identify agents that bind and/or modulate the biological activity of the gene product.

[0256] In addition screens can be done for genes that are induced in response to a candidate agent. After identifying a modulator based upon its ability to suppress a prostate cancer expression pattern leading to a normal expression pattern, or to modulate a single prostate cancer gene expression profile so as to mimic the expression of the gene from normal tissue, a screen as described above can be performed to identify genes that are specifically modulated in response to the agent. Comparing expression profiles between normal tissue and agent treated prostate cancer tissue reveals genes that are not expressed in normal tissue or prostate cancer tissue, but are expressed in agent treated tissue. These agent-specific sequences can be identified and used by methods described herein for prostate cancer genes or proteins. In particular these sequences and the proteins they encode find use in marking or identifying agent treated cells. In addition, antibodies can be raised against the agent induced proteins and used to target novel therapeutics to the treated prostate cancer tissue sample.

[0257] Thus, in one embodiment, a test compound is administered to a population of prostate cancer cells, that have an associated prostate cancer expression profile. By “administration” or “contacting” herein is meant that the candidate agent is added to the cells in such a manner as to allow the agent to act upon the cell, whether by uptake and intracellular action, or by action at the cell surface. In some embodiments, nucleic acid encoding a proteinaceous candidate agent (i.e., a peptide) may be put into a viral construct such as an adenoviral or retroviral construct, and added to the cell, such that expression of the peptide agent is accomplished, e.g., PCT US97/01019. Regulatable gene therapy systems can also be used.

[0258] Once the test compound has been administered to the cells, the cells can be washed if desired and are allowed to incubate under preferably physiological conditions for some period of time. The cells are then harvested and a new gene expression profile is generated, as outlined herein.

[0259] Thus, e.g., prostate cancer tissue may be screened for agents that modulate, e.g., induce or suppress the prostate cancer phenotype. A change in at least one gene, preferably many, of the expression profile indicates that the agent has an effect on prostate cancer activity. By defining such a signature for the prostate cancer phenotype, screens for new drugs that alter the phenotype can be devised. With this approach, the drug target need not be known and need not be represented in the original expression screening platform, nor does the level of transcript for the target protein need to change.

[0260] In a preferred embodiment, as outlined above, screens may be done on individual genes and gene products (proteins). That is, having identified a particular differentially expressed gene as important in a particular state, screening of modulators of either the expression of the gene or the gene product itself can be done. The gene products of differentially expressed genes are sometimes referred to herein as “prostate cancer proteins” or a “prostate cancer modulatory protein”. The prostate cancer modulatory protein may be a fragment, or alternatively, be the full length protein to the fragment encoded by the nucleic acids of Tables 1-16. Preferably, the prostate cancer modulatory protein is a fragment. In a preferred embodiment, the prostate cancer amino acid sequence which is used to determine sequence identity or similarity is encoded by a nucleic acid of Tables 1-16. In another embodiment, the sequences are naturally occurring allelic variants of a protein encoded by a nucleic acid of Tables 1-16. In another embodiment, the sequences are sequence variants as further described herein.

[0261] Preferably, the prostate cancer modulatory protein is a fragment of approximately 14 to 24 amino acids long. More preferably the fragment is a soluble fragment. Preferably, the fragment includes a non-transmembrane region. In a preferred embodiment, the fragment has an N-terminal Cys to aid in solubility. In one embodiment, the C-terminus of the fragment is kept as a free acid and the N-terminus is a free amine to aid in coupling, i.e., to cysteine.

[0262] In one embodiment the prostate cancer proteins are conjugated to an immunogenic agent as discussed herein. In one embodiment the prostate cancer protein is conjugated to BSA.

[0263] Measurements of prostate cancer polypeptide activity, or of prostate cancer or the prostate cancer phenotype can be performed using a variety of assays. For example, the effects of the test compounds upon the function of the prostate cancer polypeptides can be measured by examining parameters described above. A suitable physiological change that affects activity can be used to assess the influence of a test compound on the polypeptides of this invention. When the functional consequences are determined using intact cells or animals, one can also measure a variety of effects such as, in the case of prostate cancer associated with tumors, tumor growth, tumor metastasis, neovascularization, hormone release, transcriptional changes to both known and uncharacterized genetic markers (e.g., northern blots), changes in cell metabolism such as cell growth or pH changes, and changes in intracellular second messengers such as cGMP. In the assays of the invention, mammalian prostate cancer polypeptide is typically used, e.g., mouse, preferably human.

[0264] Assays to identify compounds with modulating activity can be performed in vitro. For example, a prostate cancer polypeptide is first contacted with a potential modulator and incubated for a suitable amount of time, e.g., from 0.5 to 48 hours. In one embodiment, the prostate cancer polypeptide levels are determined in vitro by measuring the level of protein or mRNA. The level of protein is measured using immunoassays such as western blotting, ELISA and the like with an antibody that selectively binds to the prostate cancer polypeptide or a fragment thereof. For measurement of mRNA, amplification, e.g., using PCR, LCR, or hybridization assays, e.g., northern hybridization, RNAse protection, dot blotting, are preferred. The level of protein or mRNA is detected using directly or indirectly labeled detection agents, e.g., fluorescently or radioactively labeled nucleic acids, radioactively or enzymatically labeled antibodies, and the like, as described herein.

[0265] Alternatively, a reporter gene system can be devised using the prostate cancer protein promoter operably linked to a reporter gene such as luciferase, green fluorescent protein, CAT, or Regal. The reporter construct is typically transfected into a cell. After treatment with a potential modulator, the amount of reporter gene transcription, translation, or activity is measured according to standard techniques known to those of skill in the art.

[0266] In a preferred embodiment, as outlined above, screens may be done on individual genes and gene products (proteins). That is, having identified a particular differentially expressed gene as important in a particular state, screening of modulators of the expression of the gene or the gene product itself can be done. The gene products of differentially expressed genes are sometimes referred to herein as “prostate cancer proteins.” The prostate cancer protein may be a fragment, or alternatively, be the full length protein to a fragment shown herein.

[0267] In one embodiment, screening for modulators of expression of specific genes is performed. Typically, the expression of only one or a few genes are evaluated. In another embodiment, screens are designed to first find compounds that bind to differentially expressed proteins. These compounds are then evaluated for the ability to modulate differentially expressed activity. Moreover, once initial candidate compounds are identified, variants can be further screened to better evaluate structure activity relationships.

[0268] In a preferred embodiment, binding assays are done. In general, purified or isolated gene product is used; that is, the gene products of one or more differentially expressed nucleic acids are made. For example, antibodies are generated to the protein gene products, and standard immunoassays are run to determine the amount of protein present. Alternatively, cells comprising the prostate cancer proteins can be used in the assays.

[0269] Thus, in a preferred embodiment, the methods comprise combining a prostate cancer protein and a candidate compound, and determining the binding of the compound to the prostate cancer protein. Preferred embodiments utilize the human prostate cancer protein, although other mammalian proteins may also be used, e.g. for the development of animal models of human disease. In some embodiments, as outlined herein, variant or derivative prostate cancer proteins may be used.

[0270] Generally, in a preferred embodiment of the methods herein, the prostate cancer protein or the candidate agent is non-diffusably bound to an insoluble support having isolated sample receiving areas (e.g. a microtiter plate, an array, etc.). The insoluble supports may be made of any composition to which the compositions can be bound, is readily separated from soluble material, and is otherwise compatible with the overall method of screening. The surface of such supports may be solid or porous and of any convenient shape. Examples of suitable insoluble supports include microtiter plates, arrays, membranes and beads. These are typically made of glass, plastic (e.g., polystyrene), polysaccharides, nylon or nitrocellulose, teflon™, etc. Microtiter plates and arrays are especially convenient because a large number of assays can be carried out simultaneously, using small amounts of reagents and samples. The particular manner of binding of the composition is not crucial so long as it is compatible with the reagents and overall methods of the invention, maintains the activity of the composition and is nondiffusable. Preferred methods of binding include the use of antibodies (which do not sterically block either the ligand binding site or activation sequence when the protein is bound to the support), direct binding to “sticky” or ionic supports, chemical crosslinking, the synthesis of the protein or agent on the surface, etc. Following binding of the protein or agent, excess unbound material is removed by washing. The sample receiving areas may then be blocked through incubation with bovine serum albumin (BSA), casein or other innocuous protein or other moiety.

[0271] In a preferred embodiment, the prostate cancer protein is bound to the support, and a test compound is added to the assay. Alternatively, the candidate agent is bound to the support and the prostate cancer protein is added. Novel binding agents include specific antibodies, non-natural binding agents identified in screens of chemical libraries, peptide analogs, etc. Of particular interest are screening assays for agents that have a low toxicity for human cells. A wide variety of assays may be used for this purpose, including labeled in vitro protein-protein binding assays, electrophoretic mobility shift assays, immunoassays for protein binding, functional assays (phosphorylation assays, etc.) and the like.

[0272] The determination of the binding of the test modulating compound to the prostate cancer protein may be done in a number of ways. In a preferred embodiment, the compound is labeled, and binding determined directly, e.g., by attaching all or a portion of the prostate cancer protein to a solid support, adding a labeled candidate agent (e.g., a fluorescent label), washing off excess reagent, and determining whether the label is present on the solid support. Various blocking and washing steps may be utilized as appropriate.

[0273] In some embodiments, only one of the components is labeled, e.g., the proteins (or proteinaceous candidate compounds) can be labeled. Alternatively, more than one component can be labeled with different labels, e.g., ¹²⁵I for the proteins and a fluorophor for the compound. Proximity reagents, e.g., quenching or energy transfer reagents are also useful.

[0274] In one embodiment, the binding of the test compound is determined by competitive binding assay. The competitor is a binding moiety known to bind to the target molecule (i.e., a prostate cancer protein), such as an antibody, peptide, binding partner, ligand, etc. Under certain circumstances, there may be competitive binding between the compound and the binding moiety, with the binding moiety displacing the compound. In one embodiment, the test compound is labeled. Either the compound, or the competitor, or both, is added first to the protein for a time sufficient to allow binding, if present. Incubations may be performed at a temperature which facilitates optimal activity, typically between 4 and 40° C. Incubation periods are typically optimized, e.g., to facilitate rapid high throughput screening. Typically between 0.1 and 1 hour will be sufficient. Excess reagent is generally removed or washed away. The second component is then added, and the presence or absence of the labeled component is followed, to indicate binding.

[0275] In a preferred embodiment, the competitor is added first, followed by the test compound. Displacement of the competitor is an indication that the test compound is binding to the prostate cancer protein and thus is capable of binding to, and potentially modulating, the activity of the prostate cancer protein. In this embodiment, either component can be labeled. Thus, e.g., if the competitor is labeled, the presence of label in the wash solution indicates displacement by the agent. Alternatively, if the test compound is labeled, the presence of the label on the support indicates displacement.

[0276] In an alternative embodiment, the test compound is added first, with incubation and washing, followed by the competitor. The absence of binding by the competitor may indicate that the test compound is bound to the prostate cancer protein with a higher affinity. Thus, if the test compound is labeled, the presence of the label on the support, coupled with a lack of competitor binding, may indicate that the test compound is capable of binding to the prostate cancer protein.

[0277] In a preferred embodiment, the methods comprise differential screening to identity agents that are capable of modulating the activity of the prostate cancer proteins. In this embodiment, the methods comprise combining a prostate cancer protein and a competitor in a first sample. A second sample comprises a test compound, a prostate cancer protein, and a competitor. The binding of the competitor is determined for both samples, and a change, or difference in binding between the two samples indicates the presence of an agent capable of binding to the prostate cancer protein and potentially modulating its activity. That is, if the binding of the competitor is different in the second sample relative to the first sample, the agent is capable of binding to the prostate cancer protein.

[0278] Alternatively, differential screening is used to identify drug candidates that bind to the native prostate cancer protein, but cannot bind to modified prostate cancer proteins. The structure of the prostate cancer protein may be modeled, and used in rational drug design to synthesize agents that interact with that site. Drug candidates that affect the activity of a prostate cancer protein are also identified by screening drugs for the ability to either enhance or reduce the activity of the protein.

[0279] Positive controls and negative controls may be used in the assays. Preferably control and test samples are performed in at least triplicate to obtain statistically significant results. Incubation of all samples is for a time sufficient for the binding of the agent to the protein. Following incubation, samples are washed free of non-specifically bound material and the amount of bound, generally labeled agent determined. For example, where a radiolabel is employed, the samples may be counted in a scintillation counter to determine the amount of bound compound.

[0280] A variety of other reagents may be included in the screening assays. These include reagents like salts, neutral proteins, e.g. albumin, detergents, etc. which may be used to facilitate optimal protein-protein binding and/or reduce non-specific or background interactions. Also reagents that otherwise improve the efficiency of the assay, such as protease inhibitors, nuclease inhibitors, anti-microbial agents, etc., may be used. The mixture of components may be added in an order that provides for the requisite binding.

[0281] In a preferred embodiment, the invention provides methods for screening for a compound capable of modulating the activity of a prostate cancer protein. The methods comprise adding a test compound, as defined above, to a cell comprising prostate cancer proteins. Preferred cell types include almost any cell. The cells contain a recombinant nucleic acid that encodes a prostate cancer protein. In a preferred embodiment, a library of candidate agents are tested on a plurality of cells.

[0282] In one aspect, the assays are evaluated in the presence or absence or previous or subsequent exposure of physiological signals, e.g. hormones, antibodies, peptides, antigens, cytokines, growth factors, action potentials, pharmacological agents including chemotherapeutics, radiation, carcinogenics, or other cells (i.e. cell-cell contacts). In another example, the determinations are determined at different stages of the cell cycle process.

[0283] In this way, compounds that modulate prostate cancer agents are identified. Compounds with pharmacological activity are able to enhance or interfere with the activity of the prostate cancer protein. Once identified, similar structures are evaluated to identify critical structural feature of the compound.

[0284] In one embodiment, a method of inhibiting prostate cancer cell division is provided. The method comprises administration of a prostate cancer inhibitor. In another embodiment, a method of inhibiting prostate cancer is provided. The method comprises administration of a prostate cancer inhibitor. In a further embodiment, methods of treating cells or individuals with prostate cancer are provided. The method comprises administration of a prostate cancer inhibitor.

[0285] In one embodiment, a prostate cancer inhibitor is an antibody as discussed above. In another embodiment, the prostate cancer inhibitor is an antisense molecule.

[0286] A variety of cell growth, proliferation, and metastasis assays are known to those of skill in the art, as described below.

[0287] Soft Agar Growth or Colony Formation in Suspension

[0288] Normal cells require a solid substrate to attach and grow. When the cells are transformed, they lose this phenotype and grow detached from the substrate. For example, transformed cells can grow in stirred suspension culture or suspended in semi-solid media, such as semi-solid or soft agar. The transformed cells, when transfected with tumor suppressor genes, regenerate normal phenotype and require a solid substrate to attach and grow. Soft agar growth or colony formation in suspension assays can be used to identify modulators of prostate cancer sequences, which when expressed in host cells, inhibit abnormal cellular proliferation and transformation. A therapeutic compound would reduce or eliminate the host cells' ability to grow in stirred suspension culture or suspended in semi-solid media, such as semi-solid or soft.

[0289] Techniques for soft agar growth or colony formation in suspension assays are described in Freshney, Culture of Animal Cells a Manual of Basic Technique (3^{rd} ed., 1994), herein incorporated by reference. See also, the methods section of Garkavtsev et al. (1996), supra, herein incorporated by reference.

[0290] Contact Inhibition and Density Limitation of Growth

[0291] Normal cells typically grow in a flat and organized pattern in a petri dish until they touch other cells. When the cells touch one another, they are contact inhibited and stop growing. When cells are transformed, however, the cells are not contact inhibited and continue to grow to high densities in disorganized foci. Thus, the transformed cells grow to a higher saturation density than normal cells. This can be detected morphologically by the formation of a disoriented monolayer of cells or rounded cells in foci within the regular pattern of normal surrounding cells. Alternatively, labeling index with (³H)-thymidine at saturation density can be used to measure density limitation of growth. See Freshney (1994), supra. The transformed cells, when transfected with tumor suppressor genes, regenerate a normal phenotype and become contact inhibited and would grow to a lower density.

[0292] In this assay, labeling index with (³H)-thymidine at saturation density is a preferred method of measuring density limitation of growth. Transformed host cells are transfected with a prostate cancer-associated sequence and are grown for 24 hours at saturation density in non-limiting medium conditions. The percentage of cells labeling with (³H)-thymidine is determined autoradiographically. See, Freshney (1994), supra.

[0293] Growth Factor or Serum Dependence

[0294] Transformed cells have a lower serum dependence than their normal counterparts (see, e.g., Temin, J. Natl. Cancer Insti. 37:167-175 (1966); Eagle et al., J. Exp. Med. 131:836-879 (1970)); Freshney, supra. This is in part due to release of various growth factors by the transformed cells. Growth factor or serum dependence of transformed host cells can be compared with that of control.

[0295] Tumor Specific Markers Levels

[0296] Tumor cells release an increased amount of certain factors (hereinafter “tumor specific markers”) than their normal counterparts. For example, plasminogen activator (PA) is released from human glioma at a higher level than from normal brain cells (see, e.g., Gullino, Angiogenesis, tumor vascularization, and potential interference with tumor growth. in Biological Responses in Cancer, pp. 178-184 (Mihich (ed.) 1985)). Similarly, Tumor angiogenesis factor (TAF) is released at a higher level in tumor cells than their normal counterparts. See, e.g., Folkman, Angiogenesis and Cancer, Sem Cancer Biol. (1992)).

[0297] Various techniques which measure the release of these factors are described in Freshney (1994), supra. Also, see, Unkless et al., J. Biol. Chem. 249:4295-4305 (1974); Strickland & Beers, J. Biol. Chem. 251:5694-5702 (1976); Whur et al., Br. J. Cancer 42:305-312 (1980); Gullino, Angiogenesis, tumor vascularization, and potential interference with tumor growth. in Biological Responses in Cancer, pp. 178-184 (Mihich (ed.) 1985); Freshney Anticancer Res. 5:111-130 (1985).

[0298] Invasiveness into Matrigel

[0299] The degree of invasiveness into Matrigel or some other extracellular matrix constituent can be used as an assay to identify compounds that modulate prostate cancer-associated sequences. Tumor cells exhibit a good correlation between malignancy and invasiveness of cells into Matrigel or some other extracellular matrix constituent. In this assay, tumorigenic cells are typically used as host cells. Expression of a tumor suppressor gene in these host cells would decrease invasiveness of the host cells.

[0300] Techniques described in Freshney (1994), supra, can be used. Briefly, the level of invasion of host cells can be measured by using filters coated with Matrigel or some other extracellular matrix constituent. Penetration into the gel, or through to the distal side of the filter, is rated as invasiveness, and rated histologically by number of cells and distance moved, or by prelabeling the cells with ¹²⁵I and counting the radioactivity on the distal side of the filter or bottom of the dish. See, e.g., Freshney (1984), supra.

[0301] Tumor Growth In Vivo

[0302] Effects of prostate cancer-associated sequences on cell growth can be tested in transgenic or immune-suppressed mice. Knock-out transgenic mice can be made, in which the prostate cancer gene is disrupted or in which a prostate cancer gene is inserted. Knock-out transgenic mice can be made by insertion of a marker gene or other heterologous gene into the endogenous prostate cancer gene site in the mouse genome via homologous recombination. Such mice can also be made by substituting the endogenous prostate cancer gene with a mutated version of the prostate cancer gene, or by mutating the endogenous prostate cancer gene, e.g., by exposure to carcinogens.

[0303] A DNA construct is introduced into the nuclei of embryonic stem cells. Cells containing the newly engineered genetic lesion are injected into a host mouse embryo, which is re-implanted into a recipient female. Some of these embryos develop into chimeric mice that possess germ cells partially derived from the mutant cell line. Therefore, by breeding the chimeric mice it is possible to obtain a new line of mice containing the introduced genetic lesion (see, e.g., Capecchi et al., Science 244:1288 (1989)). Chimeric targeted mice can be derived according to Hogan et al., Manipulating the Mouse Embryo: A Laboratory Manual, Cold Spring Harbor Laboratory (1988) and Teratocarcinomas and Embryonic Stem Cells: A Practical Approach, Robertson, ed., IRL Press, Washington, D.C., (1987).

[0304] Alternatively, various immune-suppressed or immune-deficient host animals can be used. For example, genetically athymic “nude” mouse (see, e.g., Giovanella et al., J. Natl. Cancer Inst. 52:921 (1974)), a SCID mouse, a thymectomized mouse, or an irradiated mouse (see, e.g., Bradley et al., Br. J. Cancer 38:263 (1978); Selby et al., Br. J. Cancer 41:52 (1980)) can be used as a host. Transplantable tumor cells (typically about 10⁶ cells) injected into isogenic hosts will produce invasive tumors in a high proportions of cases, while normal cells of similar origin will not. In hosts which developed invasive tumors, cells expressing a prostate cancer-associated sequences are injected subcutaneously. After a suitable length of time, preferably 4-8 weeks, tumor growth is measured (e.g., by volume or by its two largest dimensions) and compared to the control. Tumors that have statistically significant reduction (using, e.g., Student's T test) are said to have inhibited growth.

Methods of Identifying Variant Prostate Cancer-Associated Sequences

[0305] Without being bound by theory, expression of various prostate cancer sequences is correlated with prostate cancer. Accordingly, disorders based on mutant or variant prostate cancer genes may be determined. In one embodiment, the invention provides methods for identifying cells containing variant prostate cancer genes, e.g., determining all or part of the sequence of at least one endogenous prostate cancer genes in a cell. This may be accomplished using any number of sequencing techniques. In a preferred embodiment, the invention provides methods of identifying the prostate cancer genotype of an individual, e.g., determining all or part of the sequence of at least one prostate cancer gene of the individual. This is generally done in at least one tissue of the individual, and may include the evaluation of a number of tissues or different samples of the same tissue. The method may include comparing the sequence of the sequenced prostate cancer gene to a known prostate cancer gene, i.e., a wild-type gene.

[0306] The sequence of all or part of the prostate cancer gene can then be compared to the sequence of a known prostate cancer gene to determine if any differences exist. This can be done using any number of known homology programs, such as Bestfit, etc. In a preferred embodiment, the presence of a difference in the sequence between the prostate cancer gene of the patient and the known prostate cancer gene correlates with a disease state or a propensity for a disease state, as outlined herein.

[0307] In a preferred embodiment, the prostate cancer genes are used as probes to determine the number of copies of the prostate cancer gene in the genome.

[0308] In another preferred embodiment, the prostate cancer genes are used as probes to determine the chromosomal localization of the prostate cancer genes. Information such as chromosomal localization finds use in providing a diagnosis or prognosis in particular when chromosomal abnormalities such as translocations, and the like are identified in the prostate cancer gene locus.

Administration of Pharmaceutical and Vaccine Compositions

[0309] In one embodiment, a therapeutically effective dose of a prostate cancer protein or modulator thereof, is administered to a patient. By “therapeutically effective dose” herein is meant a dose that produces effects for which it is administered. The exact dose will depend on the purpose of the treatment, and will be ascertainable by one skilled in the art using known techniques (e.g., Ansel et al., Pharmaceutical Dosage Forms and Drug Delivery; Lieberman, Pharmaceutical Dosage Forms (vols. 1-3, 1992), Dekker, ISBN 0824770846, 082476918X, 0824712692, 0824716981; Lloyd, The Art, Science and Technology of Pharmaceutical Compounding (1999); and Pickar, Dosage Calculations (1999)). As is known in the art, adjustments for prostate cancer degradation, systemic versus localized delivery, and rate of new protease synthesis, as well as the age, body weight, general health, sex, diet, time of administration, drug interaction and the severity of the condition may be necessary, and will be ascertainable with routine experimentation by those skilled in the art. U.S. patent application Ser. No. 09/687,576, further discloses the use of compositions and methods of diagnosis and treatment in prostate cancer is hereby expressly incorporated by reference.

[0310] A “patient” for the purposes of the present invention includes both humans and other animals, particularly mammals. Thus the methods are applicable to both human therapy and veterinary applications. In the preferred embodiment the patient is a mammal, preferably a primate, and in the most preferred embodiment the patient is human.

[0311] The administration of the prostate cancer proteins and modulators thereof of the present invention can be done in a variety of ways as discussed above, including, but not limited to, orally, subcutaneously, intravenously, intranasally, transdermally, intraperitoneally, intramuscularly, intrapulmonary, vaginally, rectally, or intraocularly. In some instances, e.g., in the treatment of wounds and inflammation, the prostate cancer proteins and modulators may be directly applied as a solution or spray.

[0312] The pharmaceutical compositions of the present invention comprise a prostate cancer protein in a form suitable for administration to a patient. In the preferred embodiment, the pharmaceutical compositions are in a water soluble form, such as being present as pharmaceutically acceptable salts, which is meant to include both acid and base addition salts. “Pharmaceutically acceptable acid addition salt” refers to those salts that retain the biological effectiveness of the free bases and that are not biologically or otherwise undesirable, formed with inorganic acids such as hydrochloric acid, hydrobromic acid, sulfuric acid, nitric acid, phosphoric acid and the like, and organic acids such as acetic acid, propionic acid, glycolic acid, pyruvic acid, oxalic acid, maleic acid, malonic acid, succinic acid, fumaric acid, tartaric acid, citric acid, benzoic acid, cinnamic acid, mandelic acid, methanesulfonic acid, ethanesulfonic acid, p-toluenesulfonic acid, salicylic acid and the like. “Pharmaceutically acceptable base addition salts” include those derived from inorganic bases such as sodium, potassium, lithium, ammonium, calcium, magnesium, iron, zinc, copper, manganese, aluminum salts and the like. Particularly preferred are the ammonium, potassium, sodium, calcium, and magnesium salts. Salts derived from pharmaceutically acceptable organic non-toxic bases include salts of primary, secondary, and tertiary amines, substituted amines including naturally occurring substituted amines, cyclic amines and basic ion exchange resins, such as isopropylamine, trimethylamine, diethylamine, triethylamine, tripropylamine, and ethanolamine.

[0313] The pharmaceutical compositions may also include one or more of the following: carrier proteins such as serum albumin; buffers; fillers such as microcrystalline cellulose, lactose, corn and other starches; binding agents; sweeteners and other flavoring agents; coloring agents; and polyethylene glycol.

[0314] The pharmaceutical compositions can be administered in a variety of unit dosage forms depending upon the method of administration. For example, unit dosage forms suitable for oral administration include, but are not limited to, powder, tablets, pills, capsules and lozenges. It is recognized that prostate cancer protein modulators (e.g., antibodies, antisense constructs, ribozymes, small organic molecules, etc.) when administered orally, should be protected from digestion. This is typically accomplished either by complexing the molecule(s) with a composition to render it resistant to acidic and enzymatic hydrolysis, or by packaging the molecule(s) in an appropriately resistant carrier, such as a liposome or a protection barrier. Means of protecting agents from digestion are well known in the art.

[0315] The compositions for administration will commonly comprise a prostate cancer protein modulator dissolved in a pharmaceutically acceptable carrier, preferably an aqueous carrier. A variety of aqueous carriers can be used, e.g., buffered saline and the like. These solutions are sterile and generally free of undesirable matter. These compositions may be sterilized by conventional, well known sterilization techniques. The compositions may contain pharmaceutically acceptable auxiliary substances as required to approximate physiological conditions such as pH adjusting and buffering agents, toxicity adjusting agents and the like, e.g., sodium acetate, sodium chloride, potassium chloride, calcium chloride, sodium lactate and the like. The concentration of active agent in these formulations can vary widely, and will be selected primarily based on fluid volumes, viscosities, body weight and the like in accordance with the particular mode of administration selected and the patient's needs (e.g., Remington's Pharmaceutical Science (15th ed., 1980) and Goodman & Gillman, The Pharmacologial Basis of Therapeutics (Hardman et al., eds., 1996)).

[0316] Thus, a typical pharmaceutical composition for intravenous administration would be about 0.1 to 10 mg per patient per day. Dosages from 0.1 up to about 100 mg per patient per day may be used, particularly when the drug is administered to a secluded site and not into the blood stream, such as into a body cavity or into a lumen of an organ. Substantially higher dosages are possible in topical administration. Actual methods for preparing parenterally administrable compositions will be known or apparent to those skilled in the art, e.g., Remington's Pharmaceutical Science and Goodman and Gillman, The Pharmacologial Basis of Therapeutics, supra.

[0317] The compositions containing modulators of prostate cancer proteins can be administered for therapeutic or prophylactic treatments. In therapeutic applications, compositions are administered to a patient suffering from a disease (e.g., a cancer) in an amount sufficient to cure or at least partially arrest the disease and its complications. An amount adequate to accomplish this is defined as a “therapeutically effective dose.” Amounts effective for this use will depend upon the severity of the disease and the general state of the patient's health. Single or multiple administrations of the compositions may be administered depending on the dosage and frequency as required and tolerated by the patient. In any event, the composition should provide a sufficient quantity of the agents of this invention to effectively treat the patient. An amount of modulator that is capable of preventing or slowing the development of cancer in a mammal is referred to as a “prophylactically effective dose.” The particular dose required for a prophylactic treatment will depend upon the medical condition and history of the mammal, the particular cancer being prevented, as well as other factors such as age, weight, gender, administration route, efficiency, etc. Such prophylactic treatments may be used, e.g., in a mammal who has previously had cancer to prevent a recurrence of the cancer, or in a mammal who is suspected of having a significant likelihood of developing cancer.

[0318] It will be appreciated that the present prostate cancer protein-modulating compounds can be administered alone or in combination with additional prostate cancer modulating compounds or with other therapeutic agent, e.g., other anti-cancer agents or treatments.

[0319] In numerous embodiments, one or more nucleic acids, e.g., polynucleotides comprising nucleic acid sequences set forth in Tables 1-16, such as antisense polynucleotides or ribozymes, will be introduced into cells, in vitro or in vivo. The present invention provides methods, reagents, vectors, and cells useful for expression of prostate cancer-associated polypeptides and nucleic acids using in vitro (cell-free), ex vivo or in vivo (cell or organism-based) recombinant expression systems.

[0320] The particular procedure used to introduce the nucleic acids into a host cell for expression of a protein or nucleic acid is application specific. Many procedures for introducing foreign nucleotide sequences into host cells may be used. These include the use of calcium phosphate transfection, spheroplasts, electroporation, liposomes, microinjection, plasma vectors, viral vectors and any of the other well known methods for introducing cloned genomic DNA, cDNA, synthetic DNA or other foreign genetic material into a host cell (see, e.g., Berger & Kimmel, Guide to Molecular Cloning Techniques, Methods in Enzymology volume 152 (Berger), Ausubel et al., eds., Current Protocols (supplemented through 1999), and Sambrook et al., Molecular Cloning—A Laboratory Manual (2nd ed., Vol. 1-3, 1989.

[0321] In a preferred embodiment, prostate cancer proteins and modulators are administered as therapeutic agents, and can be formulated as outlined above. Similarly, prostate cancer genes (including both the full-length sequence, partial sequences, or regulatory sequences of the prostate cancer coding regions) can be administered in a gene therapy application. These prostate cancer genes can include antisense applications, either as gene therapy (i.e. for incorporation into the genome) or as antisense compositions, as will be appreciated by those in the art.

[0322] Prostate cancer polypeptides and polynucleotides can also be administered as vaccine compositions to stimulate HTL, CTL and antibody responses. Such vaccine compositions can include, e.g., lipidated peptides (see, e.g., Vitiello, A. et al., J. Clin. Invest. 95:341 (1995)), peptide compositions encapsulated in poly(DL-lactide-co-glycolide) (“PLG”) microspheres (see, e.g., Eldridge, et al., Molec. Immunol. 28:287-294, (1991); Alonso et al., Vaccine 12:299-306 (1994); Jones et al., Vaccine 13:675-681 (1995)), peptide compositions contained in immune stimulating complexes (ISCOMS) (see, e.g., Takahashi et al., Nature 344:873-875 (1990); Hu et al., Clin Exp Immunol. 113:235-243 (1998)), multiple antigen peptide systems (MAPs) (see, e.g., Tam, Proc. Natl. Acad. Sci. U.S.A. 85:5409-5413 (1988); Tam, J. Immunol. Methods 196:17-32 (1996)), peptides formulated as multivalent peptides; peptides for use in ballistic delivery systems, typically crystallized peptides, viral delivery vectors (Perkus, et al., In: Concepts in vaccine development (Kaufmann, ed., p. 379, 1996); Chakrabarti, et al., Nature 320:535 (1986); Hu et al., Nature 320:537 (1986); Kieny, et al., AIDS Bio/Technology 4:790 (1986); Top et al., J. Infect. Dis. 124:148 (1971); Chanda et al., Virology 175:535 (1990)), particles of viral or synthetic origin (see, e.g., Kofler et al., J. Immunol. Methods. 192:25 (1996); Eldridge et al., Sem. Hematol. 30:16 (1993); Falo et al., Nature Med. 7:649 (1995)), adjuvants (Warren et al., Annu. Rev. Immunol. 4:369 (1986); Gupta et al., Vaccine 11:293 (1993)), liposomes (Reddy et al., J. Immunol. 148:1585 (1992); Rock, Immunol. Today 17:131 (1996)), or, naked or particle absorbed cDNA (Ulmer, et al., Science 259:1745 (1993); Robinson et al., Vaccine 11:957 (1993); Shiver et al., In: Concepts in vaccine development (Kaufmann, ed., p. 423, 1996); Cease & Berzofsky, Annu. Rev. Immunol. 12:923 (1994) and Eldridge et al., Sem. Hematol. 30:16 (1993)). Toxin-targeted delivery technologies, also known as receptor mediated targeting, such as those of Avant Immunotherapeutics, Inc. (Needham, Mass.) may also be used.

[0323] Vaccine compositions often include adjuvants. Many adjuvants contain a substance designed to protect the antigen from rapid catabolism, such as aluminum hydroxide or mineral oil, and a stimulator of immune responses, such as lipid A, Bortadella pertussis or Mycobacterium tuberculosis derived proteins. Certain adjuvants are commercially available as, e.g., Freund's Incomplete Adjuvant and Complete Adjuvant (Difco Laboratories, Detroit, Mich.); Merck Adjuvant 65 (Merck and Company, Inc., Rahway, N.J.); AS-2 (SmithKline Beecham, Philadelphia, Pa.); aluminum salts such as aluminum hydroxide gel (alum) or aluminum phosphate; salts of calcium, iron or zinc; an insoluble suspension of acylated tyrosine; acylated sugars; cationically or anionically derivatized polysaccharides; polyphosphazenes; biodegradable microspheres; monophosphoryl lipid A and quil A. Cytokines, such as GM-CSF, interleukin-2, -7, -12, and other like growth factors, may also be used as adjuvants.

[0324] Vaccines can be administered as nucleic acid compositions wherein DNA or RNA encoding one or more of the polypeptides, or a fragment thereof, is administered to a patient. This approach is described, for instance, in Wolff et. al., Science 247:1465 (1990) as well as U.S. Pat. Nos. 5,580,859; 5,589,466; 5,804,566; 5,739,118; 5,736,524; 5,679,647; WO 98/04720; and in more detail below. Examples of DNA-based delivery technologies include “naked DNA”, facilitated (bupivicaine, polymers, peptide-mediated) delivery, cationic lipid complexes, and particle-mediated (“gene gun”) or pressure-mediated delivery (see, e.g., U.S. Pat. No. 5,922,687).

[0325] For therapeutic or prophylactic immunization purposes, the peptides of the invention can be expressed by viral or bacterial vectors. Examples of expression vectors include attenuated viral hosts, such as vaccinia or fowlpox. This approach involves the use of vaccinia virus, e.g., as a vector to express nucleotide sequences that encode prostate cancer polypeptides or polypeptide fragments. Upon introduction into a host, the recombinant vaccinia virus expresses the immunogenic peptide, and thereby elicits an immune response. Vaccinia vectors and methods useful in immunization protocols are described in, e.g., U.S. Pat. No. 4,722,848. Another vector is BCG (Bacille Calmette Guerin). BCG vectors are described in Stover et al., Nature 351:456-460 (1991). A wide variety of other vectors useful for therapeutic administration or immunization e.g. adeno and adeno-associated virus vectors, retroviral vectors, Salmonella typhi vectors, detoxified anthrax toxin vectors, and the like, will be apparent to those skilled in the art from the description herein (see, e.g., Shata et al., Mol Med Today 6:66-71 (2000); Shedlock et al., J Leukoc Biol 68:793-806 (2000); Hipp et al., In Vivo 14:571-85 (2000)).

[0326] Methods for the use of genes as DNA vaccines are well known, and include placing a prostate cancer gene or portion of a prostate cancer gene under the control of a regulatable promoter or a tissue-specific promoter for expression in a prostate cancer patient. The prostate cancer gene used for DNA vaccines can encode full-length prostate cancer proteins, but more preferably encodes portions of the prostate cancer proteins including peptides derived from the prostate cancer protein. In one embodiment, a patient is immunized with a DNA vaccine comprising a plurality of nucleotide sequences derived from a prostate cancer gene. For example, prostate cancer-associated genes or sequence encoding subfragments of a prostate cancer protein are introduced into expression vectors and tested for their immunogenicity in the context of Class I MHC and an ability to generate cytotoxic T cell responses. This procedure provides for production of cytotoxic T cell responses against cells which present antigen, including intracellular epitopes.

[0327] In a preferred embodiment, the DNA vaccines include a gene encoding an adjuvant molecule with the DNA vaccine. Such adjuvant molecules include cytokines that increase the immunogenic response to the prostate cancer polypeptide encoded by the DNA vaccine. Additional or alternative adjuvants are available.

[0328] In another preferred embodiment prostate cancer genes find use in generating animal models of prostate cancer. When the prostate cancer gene identified is repressed or diminished in cancer tissue, gene therapy technology, e.g., wherein antisense RNA directed to the prostate cancer gene will also diminish or repress expression of the gene. Animal models of prostate cancer find use in screening for modulators of a prostate cancer-associated sequence or modulators of prostate cancer. Similarly, transgenic animal technology including gene knockout technology, e.g. as a result of homologous recombination with an appropriate gene targeting vector, will result in the absence or increased expression of the prostate cancer protein. When desired, tissue-specific expression or knockout of the prostate cancer protein may be necessary.

[0329] It is also possible that the prostate cancer protein is overexpressed in prostate cancer. As such, transgenic animals can be generated that overexpress the prostate cancer protein. Depending on the desired expression level, promoters of various strengths can be employed to express the transgene. Also, the number of copies of the integrated transgene can be determined and compared for a determination of the expression level of the transgene. Animals generated by such methods find use as animal models of prostate cancer and are additionally useful in screening for modulators to treat prostate cancer.

Kits for Use in Diagnostic and/or Prognostic Applications

[0330] For use in diagnostic, research, and therapeutic applications suggested above, kits are also provided by the invention. In the diagnostic and research applications such kits may include any or all of the following: assay reagents, buffers, prostate cancer-specific nucleic acids or antibodies, hybridization probes and/or primers, antisense polynucleotides, ribozymes, dominant negative prostate cancer polypeptides or polynucleotides, small molecules inhibitors of prostate cancer-associated sequences etc. A therapeutic product may include sterile saline or another pharmaceutically acceptable emulsion and suspension base.

[0331] In addition, the kits may include instructional materials containing directions (i.e., protocols) for the practice of the methods of this invention. While the instructional materials typically comprise written or printed materials they are not limited to such. Any medium capable of storing such instructions and communicating them to an end user is contemplated by this invention. Such media include, but are not limited to electronic storage media (e.g., magnetic discs, tapes, cartridges, chips), optical media (e.g., CD ROM), and the like. Such media may include addresses to internet sites that provide such instructional materials.

[0332] The present invention also provides for kits for screening for modulators of prostate cancer-associated sequences. Such kits can be prepared from readily available materials and reagents. For example, such kits can comprise one or more of the following materials: a prostate cancer-associated polypeptide or polynucleotide, reaction tubes, and instructions for testing prostate cancer-associated activity. Optionally, the kit contains biologically active prostate cancer protein. A wide variety of kits and components can be prepared according to the present invention, depending upon the intended user of the kit and the particular needs of the user. Diagnosis would typically involve evaluation of a plurality of genes or products. The genes will be selected based on correlations with important parameters in disease which may be identified in historical or outcome data.

### EXAMPLES

### Example 1

### Tissue Preparation, Labeling Chips, and Fingerprints

Purifying Total RNA from Tissue Sample Using TRIzol Reagent

[0333] The sample weight is first estimated. The tissue samples are homogenized in 1 ml of TRIzol per 50 mg of tissue using a homogenizer (e.g., Polytron 3100). The size of the generator/probe used depends upon the sample amount. A generator that is too large for the amount of tissue to be homogenized will cause a loss of sample and lower RNA yield. A larger generator (e.g., 20 mm) is suitable for tissue samples weighing more than 0.6 g. Fill tubes should not be overfilled. If the working volume is greater than 2 ml and no greater than 10 ml, a 15 ml polypropylene tube (Falcon 2059) is suitable for homogenization.

[0334] Tissues should be kept frozen until homogenized. The TRIzol is added directly to the frozen tissue before homogenization. Following homogenization, the insoluble material is removed from the homogenate by centrifugation at 7500×g for 15 min. in a Sorvall superspeed or 12,000×g for 10 min. in an Eppendorf centrifuge at 4° C. The cleared homogenate is then transferred to a new tube(s). Samples may be frozen and stored at −60 to −70° C. for at least one month or else continue with the purification.

[0335] The next process is phase separation. The homogenized samples are incubated for 5 minutes at room temperature. Then, 0.2 ml of chloroform per 1 ml of TRIzol reagent is added to the homogenization mixture. The tubes are securely capped and shaken vigorously by hand (do not vortex) for 15 seconds. The samples are then incubated at room temp. for 2-3 minutes and next centrifuged at 6500 rpm in a Sorvall superspeed for 30 min. at 4° C.

[0336] The next process is RNA Precipitation. The aqueous phase is transferred to a fresh tube. The organic phase can be saved if isolation of DNA or protein is desired. Then 0.5 ml of isopropyl alcohol is added per 1 ml of TRIzol reagent used in the original homogenization. Then, the tubes are securely capped and inverted to mix. The samples are then incubated at room temp. for 10 minutes an centrifuged at 6500 rpm in Sorvall for 20 min. at 4° C.

[0337] The RNA is then washed. The supernatant is poured off and the pellet washed with cold 75% ethanol. 1 ml of 75% ethanol is used per 1 ml of the TRIzol reagent used in the initial homogenization. The tubes are capped securely and inverted several times to loosen pellet without vortexing. They are next centrifuged at <8000 rpm (<7500×g) for 5 minutes at 4° C.

[0338] The RNA wash is decanted. The pellet is carefully transferred to an Eppendorf tube (sliding down the tube into the new tube by use of a pipet tip to help guide it in if necessary). Tube(s) sizes for precipitating the RNA depending on the working volumes. Larger tubes may take too long to dry. Dry pellet. The RNA is then resuspended in an appropriate volume (e.g., 2-5 ug/ul) of DEPC H₂0. The absorbance is then measured.

[0339] The poly A+ mRNA may next be purified from total RNA by other methods such as Qiagen's RNeasy kit. The poly A⁺ mRNA is purified from total RNA by adding the oligotex suspension which has been heated to 37° C. and mixing prior to adding to RNA. The Elution Buffer is incubated at 70° C. If there is precipitate in the buffer, warm up the 2× Binding Buffer at 65° C. The total RNA is mixed with DEPC-treated water, 2× Binding Buffer, and Oligotex according to Table 2 on page 16 of the Oligotex Handbook and next incubated for 3 minutes at 65° C. and 10 minutes at room temperature.

[0340] The preparation is centrifuged for 2 minutes at 14,000 to 18,000 g, preferably, at a “soft setting,” The supernatant is removed without disturbing Oligotex pellet. A little bit of solution can be left behind to reduce the loss of Oligotex. The supernatant is saved until satisfactory binding and elution of poly A⁺ mRNA has been found.

[0341] Then, the preparation is gently resuspended in Wash Buffer OW2 and pipetted onto the spin column and centrifuged at full speed (soft setting if possible) for 1 minute.

[0342] Next, the spin column is transferred to a new collection tube and gently resuspended in Wash Buffer OW2 and centrifuged as described herein.

[0343] Then, the spin column is transferred to a new tube and eluted with 20 to 100 ul of preheated (70° C.) Elution Buffer. The Oligotex resin is gently resuspended by pipetting up and down. The centrifugation is repeated as above and the elution repeated with fresh elution buffer or first eluate to keep the elution volume low.

[0344] The absorbance is next read to determine the yield, using diluted Elution Buffer as the blank.

[0345] Before proceeding with cDNA synthesis, the mRNA is precipitated before proceeding with cDNA synthesis, as components leftover or in the Elution Buffer from the Oligotex purification procedure will inhibit downstream enzymatic reactions of the mRNA. 0.4 vol. of 7.5 M NH4OAc+2.5 vol. of cold 100% ethanol is added and the preparation precipitated at −20° C. 1 hour to overnight (or 20-30 min. at −70° C.), and centrifuged at 14,000×g for 30 minutes at 4° C. Next, the pellet is washed with 0.5 ml of 80% ethanol (−20° C.) and then centrifuged at 14,000×g for 5 minutes at room temperature. The 80% ethanol wash is then repeated. The last bit of ethanol from the pellet is then dried without use of a speed vacuum and the pellet is then resuspended in DEPC H₂0 at 1 ug/ul concentration.

Alternatively the RNA May be Purified Using Other Methods (e.g. Qiagen's RNeasy kit).

[0346] No more than 100 ug is added to the RNeasy column. The sample volume is adjusted to 100 ul with RNase-free water. 350 ul Buffer RLT and then 250 ul ethanol (100%) are added to the sample. The preparation is then mixed by pipetting and applied to an RNeasy mini spin column for centrifugation (15 sec at >10,000 rpm). If yield is low, reapply the flowthrough to the column and centrifuge again.

[0347] Then, transfer column to a new 2 ml collection tube and add 500 ul Buffer RPE and centrifuge for 15 sec at >10,000 rpm. The flowthrough is discarded. 500 ul Buffer RPE and is then added and the preparation is centriuged for 15 sec at >10,000 rpm. The flowthrough is discarded and the column membrane dried by centrifuging for 2 min at maximum speed. The column is transferred to a new 1.5-ml collection tube. 30-50 ul of RNase-free water is applied directly onto column membrane. The column is then centrifuged for 1 min at >10,000 rpm and the elution step repeated.

[0348] The absorbance is then read to determine yield. If necessary, the material may be ethanol precipitated with ammonium acetate and 2.5× volume 100% ethanol.

First Strand cDNA Synthesis

[0349] The first strand can be make using using Gibco's “SuperScript Choice System for cDNA Synthesis” kit. The starting material is 5 ug of total RNA or 1 ug of polyA+ mRNA1. For total RNA, 2 ul of SuperScript RT is used; for polyA+ mRNA, 1 ul of SuperScript RT is used. The final volume of first strand synthesis mix is 20 ul. The RNA should be in a volume no greater than 10 ul. The RNA is incubated with 1 ul of 100 pmol T7-T24 oligo for 10 min at 70° C. followed by addition on ice of 7 ul of: 4 ul 5×1^{st} Strand Buffer, 2 ul of 0.1 M DTT, and 1 ul of 10 mM dNTP mix. The preparation is then incubated at 37° C. for 2 min before addition of the SuperScript RT followed by incubation at 37° C. for 1 hour.

Second Strand Synthesis

[0350] For the second strand synthesis, place 1st strand reactions on ice and add: 91 ul DEPC H₂0; 30 ul 5×2nd Strand Buffer; 3 ul 10 mM dNTP mix; 1 ul 10 U/ul E. coli DNA Ligase; 4 ul 10 U/ul E. coli DNA Polymerase; and 1 ul 2 U/ul RNase H. Mix and incubate 2 hours at 16° C. Add 2 ul T4 DNA Polymerase. Incubate 5 min at 16° C. Add 10 ul of 0.5M EDTA.

Cleaning Up cDNA

[0351] The cDNA is purified using Phenol:Chloroform:Isoamyl Alcohol (25:24:1) and Phase-Lock gel tubes. The PLG tubes are centrifuged for 30 sec at maximum speed. The cDNA mix is then transferred to PLG tube. An equal volume of phenol:chloroform:isamyl alcohol is then added, the preparation shaken vigorously (no vortexing), and centrifuged for 5 minutes at maximum speed. The top aqueous solution is transferred to a new tube and ethanol precipitated by adding 7.5×5M NH4OAc and 2.5× volume of 100% ethanol. Next, it is centrifuged immediately at room temperature for 20 min, maximum speed. The supernatant is removed, and the pellet washed with 2× with cold 80% ethanol. As much ethanol wash as possible should be removed before air drying the pellet; and resuspending it in 3 ul RNase-free water.

In Vitro Transcription (IVT) and Labeling with Biotin

[0352] In vitro Transcription (IVT) and labeling with biotin is performed as follows: Pipet 1.5 ul of cDNA into a thin-wall PCR tube. Make NTP labeling mix by combining 2 ul T7 10×ATP (75 mM) (Ambion); 2 ul T7 10×GTP (75 mM) (Ambion); 1.5 ul T7 10×CTP (75 mM) (Ambion); 1.5 ul T7 10×UTP (75 mM) (Ambion); 3.75 ul 10 mM Bio-11-UTP (Boehringer-Mannheim/Roche or Enzo); 3.75 ul 10 mM Bio-16-CTP (Enzo); 2 ul 10× T7 transcription buffer (Ambion); and 2 ul 10× T7 enzyme mix (Ambion). The final volume is 20 ul. Incubate 6 hours at 37° C. in a PCR machine. The RNA can be furthered cleaned. Clean-up follows the previous instructions for RNeasy columns or Qiagen's RNeasy protocol handbook. The cRNA often needs to be ethanol precipitated by resuspension in a volume compatible with the fragmentation step.

[0353] Fragmentation is performed as follows. 15 ug of labeled RNA is usually fragmented. Try to minimize the fragmentation reaction volume; a 10 ul volume is recommended but 20 ul is all right. Do not go higher than 20 ul because the magnesium in the fragmentation buffer contributes to precipitation in the hybridization buffer. Fragment RNA by incubation at 94 C for 35 minutes in 1× Fragmentation buffer (5× Fragmentation buffer is 200 mM Tris-acetate, pH 8.1; 500 mM KOAc; 150 mM MgOAc). The labeled RNA transcript can be analyzed before and after fragmentation. Samples can be heated to 65° C. for 15 minutes and electrophoresed on 1% agarose/TBE gels to get an approximate idea of the transcript size range.

[0354] For hybridization, 200 ul (10 ug cRNA) of a hybridization mix is put on the chip. If multiple hybridizations are to be done (such as cycling through a 5 chip set), then it is recommended that an initial hybridization mix of 300 ul or more be made. The hybridization mix is: fragment labeled RNA (50 ng/ul final conc.); 50 pM 948-b control oligo; 1.5 pM BioB; 5 pM BioC; 25 pM BioD; 100 pM CRE; 0.1 mg/ml herring sperm DNA; 0.5 mg/ml acetylated BSA; and 300 ul with 1×MES hyb buffer.

[0355] The hybridization reaction is conducted with non-biotinylated IVT (purified by RNeasy columns) (see example 1 for steps from tissue to IVT): The following mixture is prepared:

| IVT antisense RNA, 4 μg: | | μl |
|---|---|---|
| Random Hexamers (1 μg/μl): | 4 | μl |
| H₂O: | | μl |
| | 14 | μl |

Incubate the above 14 μl mixture at 70° C. for 10 min.; then put on ice.

[0356] The Reverse transcription procedure uses the following mixture:

| | | |
|---|---|---|
| 0.1 M DTT: | 3 | μl |
| 50X dNTP mix: | 0.6 | μl |
| H₂O: | 2.4 | μl |
| Cy3 or Cy5 dUTP (1 mM): | 3 | μl |
| SS RT II (BRL): | 1 | μl |
| | 16 | μl |

The above solution is added to the hybridization reaction and incubated for 30 min., 42° C. Then, 1 μl SSII is added and incubated for another hour before being placed on ice.

[0357] The 50×dNTP mix contains 25 mM of cold dATP, dCTP, and dGTP, 10 mM of dTTP and is made by adding 25 μl each of 100 mM dATP, dCTP, and dGTP; 10 μl of 100 mM dTTP to 15 μl H₂O.]

[0358] RNA degradation is performed as follows. Add 86 μl H₂O, 1.5 μl 1M NaOH/2 mM EDTA and incubate at 65° C., 10 min. For U-Con 30, 500 μl TE/sample spin at 7000 g for 10 min, save flow through for purification. For Qiagen purification, suspend u-con recovered material in 500 μl buffer PB and proceed using Qiagen protocol. For DNAse digestion, add 1 ul of 1/100 dilution of DNAse/30 ul Rx and incubate at 37° C. for 15 min. Incubate at 5 min 95° C. to denature the DNAse.

Sample Preparation

[0359] For sample preparation, add Cot-1 DNA, 10 μl; 50×dNTPs, 1 μl; 20×SSC, 2.3 μl; Na pyro phosphate, 7.5 μl; 10 mg/ml Herring sperm DNA; 1 ul of 1/10 dilution to 21.8 final vol. Dry in speed vac. Resuspend in 15 μl H₂O. Add 0.38 μl 10% SDS. Heat 95° C., 2 min and slow cool at room temp. for 20 min. Put on slide and hybridize overnight at 64° C. Washing after the hybridization: 3×SSC/0.03% SDS: 2 min., 37.5 ml 20×SSC+0.75 ml 10% SDS in 250 ml H₂O; 1×SSC: 5 min., 12.5 ml 20×SSC in 250 ml H₂O; 0.2×SSC: 5 min., 2.5 ml 20×SSC in 250 ml H₂O. Dry slides and scan at appropiate PMT's and channels.

### Example 2

### Taxol Resistant Xenograft Model of Human Prostate Cancer

[0360] Treatment regimens that include paclitaxel (Taxol; Bristol-Myers Squibb Company, Princeton, N.J.) have been particularly successful in treating hormone-refractory prostate cancer in the phase II setting (Smith et al., Semin. Oncol. 26(1 Suppl 2):109-11 (1999)). However, many patients develop tumors which are initially, or later become, resistant to taxol. To identify genes that may be involved with resistance to taxol, or are regulated in response to taxol resistance, and therefore may be used to treat, or identify, taxol resistance in patients, the following experiments were carried out.

[0361] The androgen-independent human cell line CWR22R was grown as a xenograft in nude mice (Nagabhushan et al., Cancer Res. 56(13):3042-3046 (1996); Agus et al., J. Natl. Cancer Inst.91(21):1869-1876 (1999); Bubendorf et al., J. Natl. Cancer Inst. 91(20):1758-1764 (1999)). Initially, these xenograft tumors were sensitive to therapeutic doses of taxol. The mice were treated continuously with sub-therapeutic doses, and the tumors were allowed to grow for 3-4 weeks, before surgical removal of the tumors. The tumor from an individual mouse was then minced, and a small portion was then injected into a healthy nude mouse, establishing a second

[0362] passage of the tumor. This mouse was then treated continuously with the same sub-therapeutic dose of taxol. This process was repeated 14 times, and a portion of each generation of xenograft tumor was collected. There was increasing resistance to therapeutic doses of taxol with each generation. Bythe end of the process, the tumors were fully resistant to therapeutic doses of taxol. RNA from each generation of tumor was then isolated, and individual mRNA species were quantified using a custom Affymetrix GeneChip® oligonucleotide microarray, with probes to interrogate approximately 35,000 unique mRNA transcripts. Genes were selected that showed a statistically significant up-regulation, or down-regulation, during the subsequent generations of increasingly taxol-resistant tumors. Only one gene was significantly up-regulated, whereas 24 genes were down-regulated; these are presented in Table 10.

[0363] The gene sequences identified to be overexpressed in prostate cancer may be used to identify coding regions from the public DNA database. The sequences may be used to either identify genes that encode known proteins, or they may be used to predict the coding regions from genomic DNA using exon prediction algorithms, such as FGENESH (Salamov and Solovyev, 2000, Genome Res. 10:516-522). In addition, one of ordinary skill in the art would understand how to obtain the unigene cluster identification and sequence information according to the exemplar accession numbers provided in Tables 1-16. (see, http://www.ncbi.nlm.nih.gov/UniGene/).

LENGTHY TABLE REFERENCED HERE
US20070059712A1-20070315-T00001
Please refer to the end of the specification for access instructions.

LENGTHY TABLE REFERENCED HERE
US20070059712A1-20070315-T00002
Please refer to the end of the specification for access instructions.

LENGTHY TABLE REFERENCED HERE
US20070059712A1-20070315-T00003
Please refer to the end of the specification for access instructions.

LENGTHY TABLE REFERENCED HERE
US20070059712A1-20070315-T00004
Please refer to the end of the specification for access instructions.

LENGTHY TABLE REFERENCED HERE
US20070059712A1-20070315-T00005
Please refer to the end of the specification for access instructions.

LENGTHY TABLE REFERENCED HERE
US20070059712A1-20070315-T00006
Please refer to the end of the specification for access instructions.

LENGTHY TABLE REFERENCED HERE
US20070059712A1-20070315-T00007
Please refer to the end of the specification for access instructions.

LENGTHY TABLE REFERENCED HERE
US20070059712A1-20070315-T00008
Please refer to the end of the specification for access instructions.

LENGTHY TABLE REFERENCED HERE
US20070059712A1-20070315-T00009
Please refer to the end of the specification for access instructions.

LENGTHY TABLE REFERENCED HERE
US20070059712A1-20070315-T00010
Please refer to the end of the specification for access instructions.

LENGTHY TABLE REFERENCED HERE
US20070059712A1-20070315-T00011
Please refer to the end of the specification for access instructions.

LENGTHY TABLE REFERENCED HERE
US20070059712A1-20070315-T00012
Please refer to the end of the specification for access instructions.

LENGTHY TABLE REFERENCED HERE
US20070059712A1-20070315-T00013
Please refer to the end of the specification for access instructions.

LENGTHY TABLE REFERENCED HERE
US20070059712A1-20070315-T00014
Please refer to the end of the specification for access instructions.

LENGTHY TABLE REFERENCED HERE
US20070059712A1-20070315-T00015
Please refer to the end of the specification for access instructions.

LENGTHY TABLE REFERENCED HERE
US20070059712A1-20070315-T00016
Please refer to the end of the specification for access instructions.

LENGTHY TABLE REFERENCED HERE
US20070059712A1-20070315-T00017
Please refer to the end of the specification for access instructions.

LENGTHY TABLE REFERENCED HERE
US20070059712A1-20070315-T00018
Please refer to the end of the specification for access instructions.

LENGTHY TABLE REFERENCED HERE
US20070059712A1-20070315-T00019
Please refer to the end of the specification for access instructions.

LENGTHY TABLE REFERENCED HERE
US20070059712A1-20070315-T00020
Please refer to the end of the specification for access instructions.

LENGTHY TABLE REFERENCED HERE
US20070059712A1-20070315-T00021
Please refer to the end of the specification for access instructions.

LENGTHY TABLE REFERENCED HERE
US20070059712A1-20070315-T00022
Please refer to the end of the specification for access instructions.

LENGTHY TABLE REFERENCED HERE
US20070059712A1-20070315-T00023
Please refer to the end of the specification for access instructions.

LENGTHY TABLE REFERENCED HERE
US20070059712A1-20070315-T00024
Please refer to the end of the specification for access instructions.

LENGTHY TABLE REFERENCED HERE
US20070059712A1-20070315-T00025
Please refer to the end of the specification for access instructions.

LENGTHY TABLE REFERENCED HERE
US20070059712A1-20070315-T00026
Please refer to the end of the specification for access instructions.

LENGTHY TABLE REFERENCED HERE
US20070059712A1-20070315-T00027
Please refer to the end of the specification for access instructions.

LENGTHY TABLE REFERENCED HERE
US20070059712A1-20070315-T00028
Please refer to the end of the specification for access instructions.

LENGTHY TABLE REFERENCED HERE
US20070059712A1-20070315-T00029
Please refer to the end of the specification for access instructions.

LENGTHY TABLE REFERENCED HERE
US20070059712A1-20070315-T00030
Please refer to the end of the specification for access instructions.

LENGTHY TABLE REFERENCED HERE
US20070059712A1-20070315-T00031
Please refer to the end of the specification for access instructions.

LENGTHY TABLE REFERENCED HERE
US20070059712A1-20070315-T00032
Please refer to the end of the specification for access instructions.

LENGTHY TABLE REFERENCED HERE
US20070059712A1-20070315-T00033
Please refer to the end of the specification for access instructions.

LENGTHY TABLE REFERENCED HERE
US20070059712A1-20070315-T00034
Please refer to the end of the specification for access instructions.

LENGTHY TABLE REFERENCED HERE
US20070059712A1-20070315-T00035
Please refer to the end of the specification for access instructions.

LENGTHY TABLE REFERENCED HERE
US20070059712A1-20070315-T00036
Please refer to the end of the specification for access instructions.

[0364] It is understood that the examples described above in no way serve to limit the true scope of this invention, but rather are presented for illustrative purposes. All publications, sequences of accession numbers, and patent applications cited in this specification are herein incorporated by reference as if each individual publication or patent application were specifically and individually indicated to be incorporated by reference.

LENGTHY TABLE
The patent application contains a lengthy table section. A copy of the table is available in electronic form from the USPTO web site (http://seqdata.uspto.gov/?pageRequest=docDetail&DocID=US20070059712A1). An electronic copy of the table will also be available from the USPTO upon request and payment of the fee set forth in 37 CFR 1.19(b)(3).

The application's sequence listing, which the Patent Office published only in electronic form, follows.

SEQUENCE LISTING (294 sequences)

SEQ ID NO: 1 - DNA, 4793 bp, human organism
attggatcaaacatgtcacaagagtcggacaataataaaagactagtggccttagtgcccatgcccagtgaccctccattcaatacccgaagagcctacaccagtgaggatgaagcctggaagtcatacttggagaatcccctgacagcagccaccaaggccatgatgatcattaatggtgatgaggacagtgctgctgccctcggcctgctctatgactactacaaggttcctcgagacaagaggctgctgtctgtaagcaaagcaagtgacagccaagaagaccaggagaaaagaaactgccttggcaccagtgaagcccagagtaatttgagtggaggagaaaaccgagtgcaagtcctaaagactgttccagtgaacctttccctaaatcaagatcacctggagaattccaagcgggaacagtacagcatcagcttccccgagagctctgccatcatcccggtgtcgggaatcacggtggtgaaagctgaagatttcacaccagttttcatggccccacctgtgcactatccccggggagatggggaagagcaacgagtggttatctttgaacagactcagtatgacgtgccctcgctggccacccacagcgcctatctcaaagacgaccagcgcagcactccggacagcacatacagcgagagcttcaaggacgcagccacagagaaatttcggagtgcttcagttggggctgaggagtacatgtatgatcagacatcaagtggcacatttcagtacaccctggaagccaccaaatctctccgtcagaagcagggggagggccccatgacctacctcaacaaaggacagttctatgccataacactcagcgagaccggagacaacaaatgcttccgacaccccatcagcaaagtcaggagtgtggtgatggtggtcttcagtgaagacaaaaacagagatgaacagctcaaatactggaaatactggcactctcggcagcatacggcgaagcagagggtccttgacattgccgattacaaggagagctttaatacgattggaaacattgaagagattgcatataatgctgtttcctttacctgggacgtgaatgaagaggcgaagattttcatcaccgtgaattgcttgagcacagatttctcctcccaaaaaggggtgaaaggacttcctttgatgattcagattgacacatacagttataacaatcgtagcaataaacccattcatagagcttattgccagatcaaggtcttctgtgacaaaggagcagaaagaaaaatccgagatgaagagcagaagcagaacaggaagaacgggaaaggccaggcctcccaaactcaatgcaacagctcctctgatgggaagttggctgccatacctttacagaagaagagtgacatcacctacttcaaaaccatgcctgatctccactcacagccagttctcttcatacctgatgttcactttgcaaacctgcagaggaccggacaggtgtattacaacacggatgatgaacgagaaggtggcagtgtccttgttaaacggatgttccggcccatggaagaggagtttggtccggtgccttcaaagcagatgaaagaagaagggacaaagcgagtgctcttgtacgtgaggaaggagactgacgatgtgttcgatgcattgatgttgaagtctcccacagtgatgggcctgatggaagcgatatctgagaaatatgggctgcccgtggagaagatagcaaagctttacaagaaaagcaaaaaaggcatcttggtgaacatggatgacaacatcatcgagcactactcgaacgaggacaccttcatcctcaacatggagagcatggtggagggcttcaaggtcacgctcatggaaatctagccctgggtttggcatccgctttggctggagctctcagtgcgttcctccctgagagagacagaagccccagccccagaacctggagacccatctcccccatctcacaactgctgttacaagaccgtgctggggagtggggcaagggacaggccccacagtcggtgtgcttggcccatccactggcacctaccacggagccgaagcctgagcccctcaggaaggtgccttaggcctgttggattcctatttattgcccaccttttcctggagcccaggtccaggcccgccaggactctgcaggtcactgctagctccagatgagaccgtccagcgttcccccttcaagagaaacactcatcccgaacagcctaaaaaattcccatcccttctttctcacccctccatatctatatctcccgagtggctggacaaaatgagctacgtctgggtgcagtagttataggtggggcaagaggtggatgcccactttctggtcagacacctttaggttgctctggggaaggctgtcttgctaaatacctccagggttcccagcaagtggccaccaggccttgtacaggaagacattcagtcaccgtgtaattagtaacacagaaagtctgcctgtctgcattgtacatagtgtttataatattgtaataatatattttacctgtggtatgtgggcatgtttactgccactggcctagaggagacacagacctggagaccgttttaatgggggtttttgcctctgtgcctgttcaagagacttgcagggctaggtagagggcctttgggatgttaaggtgactgcagctgatgccaagatggactctgcaatgggcatacctgggggctcgttccctgtccccagaggaagccccctctccttctccatgggcatgactctccttcgaggccaccacgtttatctcacaatgatgtgttttgcctgactttccctttgcgctgtctcgtgggaaaggtcattctgtctgagaccccagctccttctccagctttggctgcgggcatggcctgagctttctggagagcctctgcagggggtttgccatcagggccctgtggctgggtctgctgcagagctccttggctatcaggagaatcctggacactgtactgtgcctcccagtttacaaacacgcccttcatctcaagtggccctttaaaaggcctgctgccatgtgagagctgtgaacagctcagctctgagtcggcagactggggcttcctcctgggccaccagatggaaagggggtattgtttgcctcactcctggatgctgcgttttaaggaagtgagtgagaaagaatgtgccaagatacctggctcctgtgaaaccagcctcaggagggaaactgggagagagaagctgtggtctcctgctacatgccctgggagctggaagagaaaaacactcccctaaacaatcgcaaaatgatgaaccatcatgggccactgttctctttgaggggacaggtttaggggtttgcgttcgcccttgtgggctgaagcactagctttttggtagctagacacatcctgcacccaaaggttctctacaaaggcccagatttgtttgtaaagcactttgactcttacctggaggcccgctctctaagggcttcctgcgctcccacctcatctgtccctgagatgcagagcaggatggagggtctgcttctagctcagctgtttctccttgaggttgcggaggaattgaattgaatgggacagagggcaggtgctgtggccaagaagatctccgagcagcagtgacggggcaccttgctgtgtgtcctctgggcatgttaacccttctgtggggccaaaggtttgcatcgtggatccagctgtgctccagtctgtcccctcctcctccactctgactgccacgccccggaccagcagcttggggaccctccagggtactaatggggctctgttctgagatggacaaattcagtgttggaaatacatgttgtactatgcacttcccatgctcctagggttaggaatagtttcaaacatgattggcagacataacaacggcaaatactcggactggggcataggactccagagtaggaaaaagacaaaagatttggcagcctgacacaggcaacctacccctctctctccagcctctttatgaaactgtttgtttgccagtcctgccctaaggcagaagatgaattgaagatgctgtgcatgtttcctaagtccttgagcaatcatggtggtgacaattgccacaagggatatgaggccagtgccaccagagggtggtgccaagtgccacatcccttccgatccattcccctctgtatcctcggagcaccccagtttgcctttgatgtgtccgctgtgtatgttagctgaactttgatgagcaaaatttcctgagcgaaacactccaaagagataggaaaacttgccgcctcttcttttttgtcccttaatcaaactcaaataagcttaaaaaaaatccatggaagatcatggacatgtgaaatgagcatttttttcttttctttttttttttttttttttaacaaagtctgaactgaacagaacaagactttttcctcatacatctccaaattgtttaaacttactttatgagtgtttgtttagaagttcggaccaacagaaaaatgcagtcagatgtcatcttggaattggtttctaaaagagtaaggcatgtccctgcccagaaacttaggaagcatgaaataaatcaaatgtttattttccttcttatttaaaatcatgctaatgcaacagaaatagagggtttgtgccaaatgctatgaacggccctttcttaaagacaagcaagggagattgatatatgtacaatttgctctcatgttttt

SEQ ID NO: 2 - protein, 625 aa, human organism
MSQESDNNKRLVALVPMPSDPPFNTRRAYTSEDEAWKSYLENPLTAATKAMMIINGDEDSAAALGLLYDYYKVPRDKRLLSVSKASDSQEDQEKRNCLGTSEAQSNLSGGENRVQVLKTVPVNLSLNQDHLENSKREQYSISFPESSAIIPVSGITVVKAEDFTPVFMAPPVHYPRGDGEEQRVVIFEQTQYDVPSLATHSAYLKDDQRSTPDSTYSESFKDAATEKFRSASVGAEEYMYDQTSSGTFQYTLEATKSLRQKQGEGPMTYLNKGQFYAITLSETGDNKCFRHPISKVRSVVMVVFSEDKNRDEQLKYWKYWHSRQHTAKQRVLDIADYKESFNTIGNIEEIAYNAVSFTWDVNEEAKIFITVNCLSTDFSSQKGVKGLPLMIQIDTYSYNNRSNKPIHRAYCQIKVFCDKGAERKIRDEEQKQNRKNGKGQASQTQCNSSSDGKLAAIPLQKKSDITYFKTMPDLHSQPVLFIPDVHFANLQRTGQVYYNTDDEREGGSVLVKRMFRPMEEEFGPVPSKQMKEEGTKRVLLYVRKETDDVFDALMLKSPTVMGLMEAISEKYGLPVEKIAKLYKKSKKGILVNMDDNIIEHYSNEDTFILNMESMVEGFKVTLMEI

SEQ ID NO: 3 - DNA, 777 bp, human organism
atgatagcaatctctgccgtcagcagtgcactcctgttctcccttctctgtgaagcaagtaccgtcgtcctactcaattccactgactcatccccgccaaccaataatttcactgatattgaagcagctctgaaagcacaattagattcagcggatatccccaaagccaggcggaagcgctacatttcgcagaatgacatgatcgccattcttgattatcataatcaagttcggggcaaagtgttcccaccggcagcaaatatggaatatatggtttgggatgaaaatcttgcaaaatcggcagaggcttgggcggctacttgcatttgggaccatggaccttcttacttactgagatttttgggccaaaatctatctgtacgcactggaagatatcgctctattctccagttggtcaagccatggtatgatgaagtgaaagattatgcttttccatatccccaggattgcaaccccagatgtcctatgagatgttttggtcccatgtgcacacattatacgcagatggtttgggccacttccaatcggataggatgcgcaattcatgcttgccaaaacatgaatgtttggggatctgtgtggcgacgtgcagtttacttggtatgcaactatgccccaaagggcaattggattggagaagcaccatataaagtaggggtaccatgttcatcttgtcctccaagttatgggggatcttgtactgacaatctgtgttttccaggagttacgtcaaactacctgtactggtttaaataa

SEQ ID NO: 4 - DNA, 777 bp, human organism
atgatagcaatctctgccgtcagcagtgcactcctgttctcccttctctgtgaagcaagtaccgtcgtcctactcaattccactgactcatccccgccaaccaataatttcactgatattgaagcagctctgaaagcacaattagattcagcggatatccccaaagccaggcggaagcgctacatttcgcagaatgacatgatcgccattcttgattatcataatcaagttcggggcaaagtgttcccaccggcagcaaatatggaatatatggtttgggatgaaaatcttgcaaaatcggcagaggcttgggcggctacttgcatttgggaccatggaccttcttacttactgagatttttgggccaaaatctatctgtacgcactggaagatatcgctctattctccagttggtcaagccatggtatgatgaagtgaaagattatgcttttccatatccccaggattgcaaccccagatgtcctatgagatgttttggtcccatgtgcacacattatacgcagatggtttgggccacttccaatcggataggatgcgcaattcatacttgccaaaacatgaatgtttggggatctgtgtggcgacgtgcagtttacttggtatgcaactatgccccaaagggcaattggattggagaagcaccatataaagtaggggtaccatgttcatcttgtcctccaagttatgggggatcttgtactgacaatctgtgttttccaggagttacgtcaaactacctgtactggtttaaataa

SEQ ID NO: 5 - protein, 258 aa, human organism
MIAISAVSSALLFSLLCEASTVVLLNSTDSSPPTNNFTDIEAALKAQLDSADIPKARRKRYISQNDMIAILDYHNQVRGKVFPPAANMEYMVWDENLAKSAEAWAATCIWDHGPSYLLRFLGQNLSVRTGRYRSILQLVKPWYDEVKDYAFPYPQDCNPRCPMRCFGPMCTHYTQMVWATSNRIGCAIHACQNMNVWGSVWRRAVYLVCNYAPKGNWIGEAPYKVGVPCSSCPPSYGGSCTDNLCFPGVTSNYLYWFK

SEQ ID NO: 6 - protein, 258 aa, human organism
MIAISAVSSALLFSLLCEASTVVLLNSTDSSPPTNNFTDIEAALKAQLDSADIPKARRKRYISQNDMIAILDYHNQVRGKVFPPAANMEYMVWDENLAKSAEAWAATCIWDHGPSYLLRFLGQNLSVRTGRYRSILQLVKPWYDEVKDYAFPYPQDCNPRCPMRCFGPMCTHYTQMVWATSNRIGCAIHTCQNMNVWGSVWRRAVYLVCNYAPKGNWIGEAPYKVGVPCSSCPPSYGGSCTDNLCFPGVTSNYLYWFK

SEQ ID NO: 7 - DNA, 2820 bp, human organism
ggcgggttcgcgccccgaaggctgagagctggcgctgctcgtgccctgtgtgccagacggcggagctccgcggccggaccccgcggccccgctttgctgccgactggagtttgggggaagaaactctcctgcgccccagaagatttcttcctcggcgaagggacagcgaaagatgagggtggcaggaagagaaggcgctttctgtctgccggggtcgcagcgcgagagggcagtgccatgttcctctccatcctagtggcgctgtgcctgtggctgcacctggcgctgggcgtgcgcggcgcgccctgcgaggcggtgcgcatccctatgtgccggcacatgccctggaacatcacgcggatgcccaaccacctgcaccacagcacgcaggagaacgccatcctggccatcgagcagtacgaggagctggtggacgtgaactgcagcgccgtgctgcgcttcttcttctgtgccatgtacgcgcccatttgcaccctggagttcctgcacgaccctatcaagccgtgcaagtcggtgtgccaacgcgcgcgcgacgactgcgagcccctcatgaagatgtacaaccacagctggcccgaaagcctggcctgcgacgagctgcctgtctatgaccgtggcgtgtgcatttcgcctgaagccatcgtcacggacctcccggaggatgttaagtggatagacatcacaccagacatgatggtacaggaaaggcctcttgatgttgactgtaaacgcctaagccccgatcggtgcaagtgtaaaaaggtgaagccaactttggcaacgtatctcagcaaaaactacagctatgttattcatgccaaaataaaagctgtgcagaggagtggctgcaatgaggtcacaacggtggtggatgtaaaagagatcttcaagtcctcatcacccatccctcgaactcaagtcccgctcattacaaattcttcttgccagtgtccacacatcctgccccatcaagatgttctcatcatgtgttacgagtggcgttcaaggatgatgcttcttgaaaattgcttagttgaaaaatggagagatcagcttagtaaaagatccatacagtgggaagagaggctgcaggaacagcggagaacagttcaggacaagaagaaaacagccgggcgcaccagtcgtagtaatccccccaaaccaaagggaaagcctcctgctcccaaaccagccagtcccaagaagaacattaaaactaggagtgcccagaagagaacaaacccgaaaagagtgtgagctaactagtttccaaagcggagacttccgacttccttacaggatgaggctgggcattgcctgggacagcctatgtaaggccatgtgccccttgccctaacaactcactgcagtgctcttcatagacacatcttgcagcatttttcttaaggctatgcttcagtttttctttgtaagccatcacaagccatagtggtaggtttgccctttggtacagaaggtgagttaaagctggtggaaaaggcttattgcattgcattcagagtaacctgtgtgcatactctagaagagtagggaaaataatgcttgttacaattcgacctaatatgtgcattgtaaaataaatgccatatttcaaacaaaacacgtaatttttttacagtatgttttattaccttttgatatctgttgttgcaatgttagtgatgttttaaaatgtgatgaaaatataatgtttttaagaaggaacagtagtggaatgaatgttaaaagatctttatgtgtttatggtctgcagaaggatttttgtgatgaaaggggattttttgaaaaattagagaagtagcatatggaaaattataatgtgtttttttaccaatgacttcagtttctgtttttagctagaaacttaaaaacaaaaataataataaagaaaaataaataaaaaggagaggcagacaatgtctggattcctgttttttggttacctgatttccatgatcatgatgcttcttgtcaacaccctcttaagcagcaccagaaacagtgagtttgtctgtaccattaggagttaggtactaattagttggctaatgctcaagtattttatacccacaagagaggtatgtcactcatcttacttcccaggacatccaccctgagaataatttgacaagcttaaaaatggccttcatgtgagtgccaaattttgtttttcttcatttaaatattttctttgcctaaatacatgtgagaggagttaaatataaatgtacagagaggaaagttgagttccacctctgaaatgagaattacttgacagttgggatactttaatcagaaaaaaagaacttatttgcagcattttatcaacaaatttcataattgtggacaattggaggcatttattttaaaaaacaattttattggccttttgctaacacagtaagcatgtattttataaggcattcaataaatgcacaacgcccaaaggaaataaaatcctatctaatcctactctccactacacagaggtaatcactattagtattttggcatattattctccaggtgtttgcttatgcacttataaaatgatttgaacaaataaaactaggaacctgtatacatgtgtttcataacctgcctcctttgcttggccctttattgagataagttttcctgtcaagaaagcagaaaccatctcatttctaacagctgtgttatattccatagtatgcattactcaacaaactgttgtgctattggatacttaggtggtttcttcactgacaatactgaataaacatctcaccggaattc

SEQ ID NO: 8 - protein, 346 aa, human organism
MFLSILVALCLWLHLALGVRGAPCEAVRIPMCRHMPWNITRMPNHLHHSTQENAILAIEQYEELVDVNCSAVLRFFFCAMYAPICTLEFLHDPIKPCKSVCQRARDDCEPLMKMYNHSWPESLACDELPVYDRGVCISPEAIVTDLPEDVKWIDITPDMMVQERPLDVDCKRLSPDRCKCKKVKPTLATYLSKNYSYVIHAKIKAVQRSGCNEVTTVVDVKEIFKSSSPIPRTQVPLITNSSCQCPHILPHQDVLIMCYEWRSRMMLLENCLVEKWRDQLSKRSIQWEERLQEQRRTVQDKKKTAGRTSRSNPPKPKGKPPAPKPASPKKNIKTRSAQKRTNPKRV

SEQ ID NO: 9 - DNA, 381 bp, human organism
gtccttcctctcctagcctaaggcgtgcaaacagagcgccactgggaggctgaaacctttaggccgatgcttgcttgcaaggtcaggcaagctggattctggtccccacctttgcagagagaacagcgatgttgtgcgcccatttctcagatcaaggaccggcccatcttactacctccaagagtgcttttctctctaataagaaaacatctactttgaaacatctactgggcgagaccaggagtgatggctcagcctgtaattctggaatttcgggaggccgaggcaggaagattccttgagcacaggagttccagaccagcctgggcaatgtagcaagacgctgtctctatttatacaataaaatttttttaaaaaagg

SEQ ID NO: 10 - protein, 57 aa, human organism
MLCAHFSDQGPAHLTTSKSAFLSNKKTSTLKHLLGETRSDGSACNSGISGGRGRKIP

SEQ ID NO: 11 - DNA, 1141 bp, human organism
tccttgggttcgggtgaaagcgcctgggggttcgtggccatgatccccgagctgctggagaactgaaggcggacagtctcctgcgaaaccaggcaatggcggagctggagtttgttcagatcatcatcatcgtggtggtgatgatggtgatggtggtggtgatcacgtgcctgctgagccactacaagctgtctgcacggtccttcatcagccggcacagccaggggcggaggagagaagatgccctgtcctcagaaggatgcctgtggccctcggagagcacagtgtcaggcaacggaatcccagagccgcaggtctacgccccgcctcggcccaccgaccgcctggccgtgccgcccttcgcccagcgggagcgcttccaccgcttccagcccacctatccgtacctgcagcacgagatcgacctgccacccaccatctcgctgtcagacggggaggagcccccaccctaccagggcccctgcaccctccagcttcgggaccccgagcagcagctggaactgaaccgggagtcggtgcgcgcacccccaaacagaaccatcttcgacagtgacctgatggatagtgccaggctgggcggcccctgcccccccagcagtaactcgggcatcagcgccacgtgctacggcagcggcgggcgcatggaggggccgccgcccacctacagcgaggtcatcggccactacccggggtcctccttccagcaccagcagagcagtgggccgccctccttgctggaggggacccggctccaccacacacacatcgcgcccctagagagcgcagccatctggagcaaagagaaggataaacagaaaggacaccctctctagggtccccaggggggccgggctggggctgcgtaggtgaaaaggcagaacactccgcgcttcttagaagaggagtgagaggaaggcggggggcgcagcaacgcatcgtgtggccctcccctcccacctccctgtgtataaatatttacatgtgatgtctggtctgaatgcacaagctaagagagcttgcaaaaaaaaaaagaaaaaagaaaaaaaaaaaccacgtttctttgttgagctgtgtcttgaaggcaaaagaaaaaaaatttctacagtaaaaaaaaaaaaaa

SEQ ID NO: 12 - protein, 252 aa, human organism
MAELEFVQIIIIVVVMMVMVVVITCLLSHYKLSARSFISRHSQGRRREDALSSEGCLWPSESTVSGNGIPEPQVYAPPRPTDRLAVPPFAQRERFHRFQPTYPYLQHEIDLPPTISLSDGEEPPPYQGPCTLQLRDPEQQLELNRESVRAPPNRTIFDSDLMDSARLGGPCPPSSNSGISATCYGSGGRMEGPPPTYSEVIGHYPGSSFQHQQSSGPPSLLEGTRLHHTHIAPLESAAIWSKEKDKQKGHPL

SEQ ID NO: 13 - DNA, 1807 bp, human organism
gcacgagggaagagggtgatccgacccggggaaggtcgctgggcagggcgagttgggaaagcggcagcccccgccgcccccgcagccccttctcctcctttctcccacgtcctatctgcctctcgctggaggccaggccgtgcagcatcgaagacaggaggaactggagcctcattggccggcccggggcgccggcctcgggcttaaataggagctccgggctctggctgggacccgaccgctgccggccgcgctcccgctgctcctgccgggtgatggaaaaccccagcccggccgccgccctgggcaaggccctctgcgctctcctcctggccactctcggcgccgccggccagcctcttgggggagagtccatctgttccgccagagccccggccaaatacagcatcaccttcacgggcaagtggagccagacggccttccccaagcagtaccccctgttccgcccccctgcgcagtggtcttcgctgctgggggccgcgcatagctccgactacagcatgtggaggaagaaccagtacgtcagtaacgggctgcgcgactttgcggagcgcggcgaggcctgggcgctgatgaaggagatcgaggcggcgggggaggcgctgcagagcgtgcacgcggtgttttcggcgcccgccgtccccagcggcaccgggcagacgtcggcggagctggaggtgcagcgcaggcactcgctggtctcgtttgtggtgcgcatcgtgcccagccccgactggttcgtgggcgtggacagcctggacctgtgcgacggggaccgttggcgggaacaggcggcgctggacctgtacccctacgacgccgggacggacagcggcttcaccttctcctcccccaacttcgccaccatcccgcaggacacggtgaccgagataacgtcctcctctcccagccacccggccaactccttctactacccgcggctgaaggccctgcctcccatcgccagggtgacactggtgcggctgcgacagagccccagggccttcatccctcccgccccagtcctgcccagcagggacaatgagattgtagacagcgcctcagttccagaaacgccgctggactgcgaggtctccctgtggtcgtcctggggactgtgcggaggccactgtgggaggctcgggaccaagagcaggactcgctacgtccgggtccagcccgccaacaacgggagcccctgccccgagctcgaagaagaggctgagtgcgtccctgataactgcgtctaagaccagagccccgcagcccctggggcccccggagccatggggtgtcgggggctcctgtgcaggctcatgctgcaggcggccgaggcacagggggtttcgcgctgctcctgaccgcggtgaggccgcgccgaccatctctgcactgaagggccctctggtggccggcacgggcattgggaaacagcctcctcctttcccaaccttgcttcttaggggcccccgtgtcccgtctgctctcagcctcctcctcctgcaggataaagtcatccccaaggctccagctactctaaattatggtctccttataagttattgctgctccaggagattgtccttcatcgtccaggggcctggctcccacgtggttgcagatacctcagacctggtgctctaggctgtgctgagcccactctcccgagggcgcatccaagcgggggccacttgagaagtgaataaatggggcggtttcggaagcgtcagtgtttccatgttatggatctctctgcgtttgaataaagactatctctgttgctcac

SEQ ID NO: 14 - protein, 331 aa, human organism
MENPSPAAALGKALCALLLATLGAAGQPLGGESICSARAPAKYSITFTGKWSQTAFPKQYPLFRPPAQWSSLLGAAHSSDYSMWRKNQYVSNGLRDFAERGEAWALMKEIEAAGEALQSVHAVFSAPAVPSGTGQTSAELEVQRRHSLVSFVVRIVPSPDWFVGVDSLDLCDGDRWREQAALDLYPYDAGTDSGFTFSSPNFATIPQDTVTEITSSSPSHPANSFYYPRLKALPPIARVTLVRLRQSPRAFIPPAPVLPSRDNEIVDSASVPETPLDCEVSLWSSWGLCGGHCGRLGTKSRTRYVRVQPANNGSPCPELEEEAECVPDNCV

SEQ ID NO: 15 - DNA, 786 bp, human organism
cgggcgaagcagcgcgggcagcgagatgcagcaccgaggcttcctcctcctcaccctcctcgccctgctggcgctcacctccgcggtcgccaaaaagaaagataaggtgaagaagggcggcccggggagcgagtgcgctgagtgggcctgggggccctgcacccccagcagcaaggattgcggcgtgggtttccgcgagggcacctgcggggcccagacccagcgcatccggtgcagggtgccctgcaactggaagaaggagtttggagccgactgcaagtacaagtttgagaactggggtgcgtgtgatgggggcacaggcaccaaagtccgccaaggcaccctgaagaaggcgcgctacaatgctcagtgccaggagaccatccgcgtcaccaagccctgcacccccaagaccaaagcaaaggccaaagccaagaaagggaagggaaaggactagacgccaagcctggatgccaaggagcccctggtgtcacatggggcctggccacgccctccctctcccaggcccgagatgtgacccaccagtgccttctgtctgctcgttagctttaatcaatcatgccctgccttgtccctctcactccccagccccacccctaagtgcccaaagtggggagggacaagggattctgggaagcttgagcctcccccaaagcaatgtgagtcccagagcccgcttttgttcttccccacaattccattactaagaaacacatcaaataaactgactttttccccccaataaaagctcttcttttttaatat

SEQ ID NO: 16 - protein, 143 aa, human organism
MQHRGFLLLTLLALLALTSAVAKKKDKVKKGGPGSECAEWAWGPCTPSSKDCGVGFREGTCGAQTQRIRCRVPCNWKKEFGADCKYKFENWGACDGGTGTKVRQGTLKKARYNAQCQETIRVTKPCTPKTKAKAKAKKGKGKD

SEQ ID NO: 17 - DNA, 1617 bp, human organism
atggtagaactagtgatctcacccagcctcactgtaaacagcgattgtctggataaactgaagtttaaccgtgctgacgctgctgtgtggactctgagtgacagacaaggcatcaccaaatcggcccccctgagagtgtcccagctcttctccagatcttgcccacgtgtcctcccccgccagccttccacagccatggcagcctacggccagacgcagtacagtgcggggatccagcaggctaccccctatacagcttacccacctccagcacaagcctatggaatcccttcctacagcatcaagacagaagacagcttgaaccattcccctggccagagtggattcctcagctatggctccagcttcagcacctcacccactggacagagcccatacacctaccagatgcacggcacaacagggttctatcaaggaggaaatggactgggcaacgcagccggtttcgggagtgtgcaccaggactatccttcctaccccggcttcccccagagccagtacccccagtattacggctcatcctacaaccctccctacgtcccggccagcagcatctgcccttcgcccctctccacgtccacctacgtcctccaggaggcatctcacaacgtccccaaccagagttccgagtcacttgctggtgaatacaacacacacaatggaccttccacaccagcgaaagagggagacacagacaggccgcaccgggcctccgacgggaagctccgaggccggtctaagaggagcagtgacccgtccccggcaggggacaatgagattgagcgtgtgttcgtgtgggacttggatgagacaataattatttttcactccttactcacggggacatttgcatccagatacgggaaggacaccacgacgtccgtgcgcattggccttatgatggaagagatgatcttcaaccttgcagatacacatctgttcttcaatgacctggaggattgtgaccagatccacgttgatgacgtctcatcagatgacaatggccaagatttaagcacatacaacttctccgctgacggcttccacagttcggccccaggagccaacctgtgcctgggctctggcgtgcacggcggcgtggactggatgaggaagctggccttccgctaccggcgggtgaaggagatgtacaatacctacaagaacaacgttggtgggttgataggcactcccaaaagggagacctggctacagctccgagctgagctggaagctctcacagacctctggctgacccactccctgaaggcactaaacctcatcaactcccggcccaactgtgtcaatgtgctggtcaccaccactcaactaattcctgccctggccaaagtcctgctatatggcctggggtctgtgtttcctattgagaacatctacagtgcaaccaagacagggaaggagagctgcttcgagaggataatgcagagattcggcagaaaagctgtctacgtggtgatcggtgatggtgtggaagaggagcaaggagcgaaaaagcacaacatgcctttctggcggatatcctgccacgcagacctggaggcactgaggcacgccctggaactggagtatttatag

SEQ ID NO: 18 - protein, 538 aa, human organism
MVELVISPSLTVNSDCLDKLKFNRADAAVWTLSDRQGITKSAPLRVSQLFSRSCPRVLPRQPSTAMAAYGQTQYSAGIQQATPYTAYPPPAQAYGIPSYSIKTEDSLNHSPGQSGFLSYGSSFSTSPTGQSPYTYQMHGTTGFYQGGNGLGNAAGFGSVHQDYPSYPGFPQSQYPQYYGSSYNPPYVPASSICPSPLSTSTYVLQEASHNVPNQSSESLAGEYNTHNGPSTPAKEGDTDRPHRASDGKLRGRSKRSSDPSPAGDNEIERVFVWDLDETIIIFHSLLTGTFASRYGKDTTTSVRIGLMMEEMIFNLADTHLFFNDLEDCDQIHVDDVSSDDNGQDLSTYNFSADGFHSSAPGANLCLGSGVHGGVDWMRKLAFRYRRVKEMYNTYKNNVGGLIGTPKRETWLQLRAELEALTDLWLTHSLKALNLINSRPNCVNVLVTTTQLIPALAKVLLYGLGSVFPIENIYSATKTGKESCFERIMQRFGRKAVYVVIGDGVEEEQGAKKHNMPFWRISCHADLEALRHALELEYL

SEQ ID NO: 19 - DNA, 2261 bp, human organism
ccgcggttccggctgctccggcgaggcgacccttgggtcggcgctgcgggcgaggtgggcaggtaggtgggcggacggccgcggttctccggcaagcgcaggcggcggagtcccccacggcgcccgaagcgccccccgcacccccggcctccagcgttgaggcgggggagtgaggagatgccgacccagagggacagcagcaccatgtcccacacggtcgcaggcggcggcagcggggaccattcccaccaggtccgggtgaaagcctactaccgcggggatatcatgataacacattttgaaccttccatctcctttgagggcctttgcaatgaggttcgagacatgtgttcttttgacaacgaacagctcttcaccatgaaatggatagatgaggaaggagacccgtgtacagtatcatctcagttggagttagaagaagcctttagactttatgagctaaacaaggattctgaactcttgattcatgtgttcccttgtgtaccagaacgtcctgggatgccttgtccaggagaagataaatccatctaccgtagaggtgcacgccgctggagaaagctttattgtgccaatggccacactttccaagccaagcgtttcaacaggcgtgctcactgtgccatctgcacagaccgaatatggggacttggacgccaaggatataagtgcatcaactgcaaactcttggttcataagaagtgccataaactcgtcacaattgaatgtgggcggcattctttgccacaggaaccagtgatgcccatggatcagtcatccatgcattctgaccatgcacagacagtaattccatataatccttcaagtcatgagagtttggatcaagttggtgaagaaaaagaggcaatgaacaccagggaaagtggcaaagcttcatccagtctaggtcttcaggattttgatttgctccgggtaataggaagaggaagttatgccaaagtactgttggttcgattaaaaaaaacagatcgtatttatgcaatgaaagttgtgaaaaaagagcttgttaatgatgatgaggatattgattgggtacagacagagaagcatgtgtttgagcaggcatccaatcatcctttccttgttgggctgcattcttgctttcagacagaaagcagattgttctttgttatagagtatgtaaatggaggagacctaatgtttcatatgcagcgacaaagaaaacttcctgaagaacatgccagattttactctgcagaaatcagtctagcattaaattatcttcatgagcgagggataatttatagagatttgaaactggacaatgtattactggactctgaaggccacattaaactcactgactacggcatgtgtaaggaaggattacggccaggagatacaaccagcactttctgtggtactcctaattacattgctcctgaaattttaagaggagaagattatggtttcagtgttgactggtgggctcttggagtgctcatgtttgagatgatggcaggaaggtctccatttgatattgttgggagctccgataaccctgaccagaacacagaggattatctcttccaagttattttggaaaaacaaattcgcataccacgttctctgtctgtaaaagctgcaagtgttctgaagagttttcttaataaggaccctaaggaacgattgggttgtcatcctcaaacaggatttgctgatattcagggacacccgttcttccgaaatgttgattgggatatgatggagcaaaaacaggtggtacctccctttaaaccaaatatttctggggaatttggtttggacaactttgattctcagtttactaatgaacctgtccagctcactccagatgacgatgacattgtgaggaagattgatcagtctgaatttgaaggttttgagtatatcaatcctcttttgatgtctgcagaagaatgtgtctgatcctcatttttcaaccatgtattctactcatgttgccatttaatgcatggataaacttgctgcaagcctggatacaattaaccattttatatttgccacctacaaaaaaacacccaatatcttctcttgtagactatatgaatcaattattacatctgttttactatgaaaaaaaaattaatactactagcttccagacaatcatgtcaaaatttagttgaactggtttttcagtttttaaaaggcctacagatgagtaatgaagttaccttttttgtttaaaaaaaaaaaag

SEQ ID NO: 20 - protein, 587 aa, human organism
MSHTVAGGGSGDHSHQVRVKAYYRGDIMITHFEPSISFEGLCNEVRDMCSFDNEQLFTMKWIDEEGDPCTVSSQLELEEAFRLYELNKDSELLIHVFPCVPERPGMPCPGEDKSIYRRGARRWRKLYCANGHTFQAKRFNRRAHCAICTDRIWGLGRQGYKCINCKLLVHKKCHKLVTIECGRHSLPQEPVMPMDQSSMHSDHAQTVIPYNPSSHESLDQVGEEKEAMNTRESGKASSSLGLQDFDLLRVIGRGSYAKVLLVRLKKTDRIYAMKVVKKELVNDDEDIDWVQTEKHVFEQASNHPFLVGLHSCFQTESRLFFVIEYVNGGDLMFHMQRQRKLPEEHARFYSAEISLALNYLHERGIIYRDLKLDNVLLDSEGHIKLTDYGMCKEGLRPGDTTSTFCGTPNYIAPEILRGEDYGFSVDWWALGVLMFEMMAGRSPFDIVGSSDNPDQNTEDYLFQVILEKQIRIPRSLSVKAASVLKSFLNKDPKERLGCHPQTGFADIQGHPFFRNVDWDMMEQKQVVPPFKPNISGEFGLDNFDSQFTNEPVQLTPDDDDIVRKIDQSEFEGFEYINPLLMSAEECV

SEQ ID NO: 21 - DNA, 5011 bp, human organism
ccaggcggcgttgcggccccggccccggctccctgcgccgccgccgccgccgccgccgccgccgccgccgccgccgccagcgctagcgccagcagccgggcccgatcacccgccgcccggtgcccgccgccgcccgcgccagcaaccgggcccgatcacccgccgcccggtgcccgccgccgcccgcgccaccggcatggcgctccggggcttctgcagcgccgatggctccgacccgctctgggactggaatgtcacgtggaataccagcaaccccgacttcaccaagtgctttcagaacacggtcctcgtgtgggtgccttgtttttacctctgggcctgtttccccttctacttcctctatctctcccgacatgaccgaggctacattcagatgacacctctcaacaaaaccaaaactgccttgggatttttgctgtggatcgtctgctgggcagacctcttctactctttctgggaaagaagtcggggcatattcctggccccagtgtttctggtcagcccaactctcttgggcatcaccacgctgcttgctacctttttaattcagctggagaggaggaagggagttcagtcttcagggatcatgctcactttctggctggtagccctagtgtgtgccctagccatcctgagatccaaaattatgacagccttaaaagaggatgcccaggtggacctgtttcgtgacatcactttctacgtctacttttccctcttactcattcagctcgtcttgtcctgtttctcagatcgctcacccctgttctcggaaaccatccacgaccctaatccctgcccagagtccagcgcttccttcctgtcgaggatcaccttctggtggatcacagggttgattgtccggggctaccgccagcccctggagggcagtgacctctggtccttaaacaaggaggacacgtcggaacaagtcgtgcctgttttggtaaagaactggaagaaggaatgcgccaagactaggaagcagccggtgaaggttgtgtactcctccaaggatcctgcccagccgaaagagagttccaaggtggatgcgaatgaggaggtggaggctttgatcgtcaagtccccacagaaggagtggaacccctctctgtttaaggtgttatacaagacctttgggccctacttcctcatgagcttcttcttcaaggccatccacgacctgatgatgttttccgggccgcagatcttaaagttgctcatcaagttcgtgaatgacacgaaggccccagactggcagggctacttctacaccgtgctgctgtttgtcactgcctgcctgcagaccctcgtgctgcaccagtacttccacatctgcttcgtcagtggcatgaggatcaagaccgctgtcattggggctgtctatcggaaggccctggtgatcaccaattcagccagaaaatcctccacggtcggggagattgtcaacctcatgtctgtggacgctcagaggttcatggacttggccacgtacattaacatgatctggtcagcccccctgcaagtcatccttgctctctacctcctgtggctgaatctgggcccttccgtcctggctggagtggcggtgatggtcctcatggtgcccgtcaatgctgtgatggcgatgaagaccaagacgtatcaggtggcccacatgaagagcaaagacaatcggatcaagctgatgaacgaaattctcaatgggatcaaagtgctaaagctttatgcctgggagctggcattcaaggacaaggtgctggccatcaggcaggaggagctgaaggtgctgaagaagtctgcctacctgtcagccgtgggcaccttcacctgggtctgcacgccctttctggtggccttgtgcacatttgccgtctacgtgaccattgacgagaacaacatcctggatgcccagacagccttcgtgtctttggccttgttcaacatcctccggtttcccctgaacattctccccatggtcatcagcagcatcgtgcaggcgagtgtctccctcaaacgcctgaggatctttctctcccatgaggagctggaacctgacagcatcgagcgacggcctgtcaaagacggcgggggcacgaacagcatcaccgtgaggaatgccacattcacctgggccaggagcgaccctcccacactgaatggcatcaccttctccatccccgaaggtgctttggtggccgtggtgggccaggtgggctgcggaaagtcgtccctgctctcagccctcttggctgagatggacaaagtggaggggcacgtggctatcaagggctccgtggcctatgtgccacagcaggcctggattcagaatgattctctccgagaaaacatcctttttggatgtcagctggaggaaccatattacaggtccgtgatacaggcctgtgccctcctcccagacctggaaatcctgcccagtggggatcggacagagattggcgagaagggcgtgaacctgtctgggggccagaagcagcgcgtgagcctggcccgggccgtgtactccaacgctgacatttacctcttcgatgatcccctctcagcagtggatgcccatgtgggaaaacacatctttgaaaatgtgattggccccaaggggatgctgaagaacaagacgcggatcttggtcacgcacagcatgagctacttgccgcaggtggacgtcatcatcgtcatgagtggcggcaagatctctgagatgggctcctaccaggagctgctggctcgagacggcgccttcgctgagttcctgcgtacctatgccagcacagagcaggagcaggatgcagaggagaacggggtcacgggcgtcagcggtccagggaaggaagcaaagcaaatggagaatggcatgctggtgacggacagtgcagggaagcaactgcagagacagctcagcagctcctcctcctatagtggggacatcagcaggcaccacaacagcaccgcagaactgcagaaagctgaggccaagaaggaggagacctggaagctgatggaggctgacaaggcgcagacagggcaggtcaagctttccgtgtactgggactacatgaaggccatcggactcttcatctccttcctcagcatcttccttttcatgtgtaaccatgtgtccgcgctggcttccaactattggctcagcctctggactgatgaccccatcgtcaacgggactcaggagcacacgaaagtccggctgagcgtctatggagccctgggcatttcacaagggatcgccgtgtttggctactccatggccgtgtccatcggggggatcttggcttcccgctgtctgcacgtggacctgctgcacagcatcctgcggtcacccatgagcttctttgagcggacccccagtgggaacctggtgaaccgcttctccaaggagctggacacagtggactccatgatcccggaggtcatcaagatgttcatgggctccctgttcaacgtcattggtgcctgcatcgttatcctgctggccacgcccatcgccgccatcatcatcccgccccttggcctcatctacttcttcgtccagaggttctacgtggcttcctcccggcagctgaagcgcctcgagtcggtcagccgctccccggtctattcccatttcaacgagaccttgctgggggtcagcgtcattcgagccttcgaggagcaggagcgcttcatccaccagagtgacctgaaggtggacgagaaccagaaggcctattaccccagcatcgtggccaacaggtggctggccgtgcggctggagtgtgtgggcaactgcatcgttctgtttgctgccctgtttgcggtgatctccaggcacagcctcagtgctggcttggtgggcctctcagtgtcttactcattgcaggtcaccacgtacttgaactggctggttcggatgtcatctgaaatggaaaccaacatcgtggccgtggagaggctcaaggagtattcagagactgagaaggaggcgccctggcaaatccaggagacagctccgcccagcagctggccccaggtgggccgagtggaattccggaactactgcctgcgctaccgagaggacctggacttcgttctcaggcacatcaatgtcacgatcaatgggggagaaaaggtcggcatcgtggggcggacgggagctgggaagtcgtccctgaccctgggcttatttcggatcaacgagtctgccgaaggagagatcatcatcgatggcatcaacatcgccaagatcggcctgcacgacctccgcttcaagatcaccatcatcccccaggaccctgttttgttttcgggttccctccgaatgaacctggacccattcagccagtactcggatgaagaagtctggacgtccctggagctggcccacctgaaggacttcgtgtcagcccttcctgacaagctagaccatgaatgtgcagaaggcggggagaacctcagtgtcgggcagcgccagcttgtgtgcctagcccgggccctgctgaggaagacgaagatccttgtgttggatgaggccacggcagccgtggacctggaaacggacgacctcatccagtccaccatccggacacagttcgaggactgcaccgtcctcaccatcgcccaccggctcaacaccatcatggactacacaagggtgatcgtcttggacaaaggagaaatccaggagtacggcgccccatcggacctcctgcagcagagaggtcttttctacagcatggccaaagacgccggcttggtgtgagccccagagctggcatatctggtcagaactgcagggcctatatgccagcgcccagggaggagtcagtacccctggtaaaccaagcctcccacactgaaaccaaaacataaaaaccaaacccagacaaccaaaacatattcaaagcagcagccaccgccatccggtcccctgcctggaactggctgtgaagacccaggagagacagagatgcgaaccacc

SEQ ID NO: 22 - protein, 1531 aa, human organism
MALRGFCSADGSDPLWDWNVTWNTSNPDFTKCFQNTVLVWVPCFYLWACFPFYFLYLSRHDRGYIQMTPLNKTKTALGFLLWIVCWADLFYSFWERSRGIFLAPVFLVSPTLLGITTLLATFLIQLERRKGVQSSGIMLTFWLVALVCALAILRSKIMTALKEDAQVDLFRDITFYVYFSLLLIQLVLSCFSDRSPLFSETIHDPNPCPESSASFLSRITFWWITGLIVRGYRQPLEGSDLWSLNKEDTSEQVVPVLVKNWKKECAKTRKQPVKVVYSSKDPAQPKESSKVDANEEVEALIVKSPQKEWNPSLFKVLYKTFGPYFLMSFFFKAIHDLMMFSGPQILKLLIKFVNDTKAPDWQGYFYTVLLFVTACLQTLVLHQYFHICFVSGMRIKTAVIGAVYRKALVITNSARKSSTVGEIVNLMSVDAQRFMDLATYINMIWSAPLQVILALYLLWLNLGPSVLAGVAVMVLMVPVNAVMAMKTKTYQVAHMKSKDNRIKLMNEILNGIKVLKLYAWELAFKDKVLAIRQEELKVLKKSAYLSAVGTFTWVCTPFLVALCTFAVYVTIDENNILDAQTAFVSLALFNILRFPLNILPMVISSIVQASVSLKRLRIFLSHEELEPDSIERRPVKDGGGTNSITVRNATFTWARSDPPTLNGITFSIPEGALVAVVGQVGCGKSSLLSALLAEMDKVEGHVAIKGSVAYVPQQAWIQNDSLRENILFGCQLEEPYYRSVIQACALLPDLEILPSGDRTEIGEKGVNLSGGQKQRVSLARAVYSNADIYLFDDPLSAVDAHVGKHIFENVIGPKGMLKNKTRILVTHSMSYLPQVDVIIVMSGGKISEMGSYQELLARDGAFAEFLRTYASTEQEQDAEENGVTGVSGPGKEAKQMENGMLVTDSAGKQLQRQLSSSSSYSGDISRHHNSTAELQKAEAKKEETWKLMEADKAQTGQVKLSVYWDYMKAIGLFISFLSIFLFMCNHVSALASNYWLSLWTDDPIVNGTQEHTKVRLSVYGALGISQGIAVFGYSMAVSIGGILASRCLHVDLLHSILRSPMSFFERTPSGNLVNRFSKELDTVDSMIPEVIKMFMGSLFNVIGACIVILLATPIAAIIIPPLGLIYFFVQRFYVASSRQLKRLESVSRSPVYSHFNETLLGVSVIRAFEEQERFIHQSDLKVDENQKAYYPSIVANRWLAVRLECVGNCIVLFAALFAVISRHSLSAGLVGLSVSYSLQVTTYLNWLVRMSSEMETNIVAVERLKEYSETEKEAPWQIQETAPPSSWPQVGRVEFRNYCLRYREDLDFVLRHINVTINGGEKVGIVGRTGAGKSSLTLGLFRINESAEGEIIIDGINIAKIGLHDLRFKITIIPQDPVLFSGSLRMNLDPFSQYSDEEVWTSLELAHLKDFVSALPDKLDHECAEGGENLSVGQRQLVCLARALLRKTKILVLDEATAAVDLETDDLIQSTIRTQFEDCTVLTIAHRLNTIMDYTRVIVLDKGEIQEYGAPSDLLQQRGLFYSMAKDAGLV

SEQ ID NO: 23 - DNA, 1290 bp, human organism
atggccggctctggcgcgtggaagcgcctcaaatctatgctaaggaaggatgatgcgccgctgtttttaaatgacaccagcgcctttgacttctcggatgaggcgggggacgaggggctttctcggttcaacaaacttcgagttgtggtggccgatgacggttccgaagccccggaaaggcctgttaacggggcgcacccgaccctccaggccgacgatgattccttactggaccaagacttacctttgaccaacagtcagctgagtttgaaggtggactcctgtgacaactgcagcaaacagagagagatactgaagcagagaaaggtgaaagccaggttgaccattgctgccgttctgtacttgcttttcatgattggagaacttgtaggtggatacattgcaaatagcctagcaatcatgacagatgcacttcatatgttaactgacctaagcgccatcatactcaccctgcttgctttgtggctatcatcaaaatcaccaaccaaaagattcacctttggatttcatcgcttagaggttttgtcagctatgattagtgtgctgttggtgtatatacttatgggattcctcttatatgaagctgtgcaaagaactatccatatgaactatgaaataaatggagatataatgctcatcaccgcagctgttggagttgcagttaatgtaataatggggtttctgttgaaccagtctggtcaccgtcactcccattcccactccctgccttcaaattcccctaccagaggttctgggtgtgaacgtaaccatgggcaggatagcctggcagtgagagctgcatttgtacatgctttgggagatttggtacagagtgttggtgtgctaatagctgcatacatcatacgattcaagccagaatacaagattgctgatcccatctgtacatacgtattttcattacttgtggcttttacaacatttcgaatcatatgggatacagtagttataatactagaaggtgtgccaagccatttgaatgtagactatatcaaagaagccttgatgaaaatagaagatgtatattcagtcgaagatttaaatatctggtctctcacttcaggaaaatctactgccatagttcacatacagctaattcctggaagttcatctaaatgggaggaagtacagtccaaagcaaaccatttattattgaacacatttggcatgtatagatgtactattcagcttcagagttacaggcaagaagtggacagaacttgtgcaaattgtcagagttctagtccctga

SEQ ID NO: 24 - protein, 429 aa, human organism
MAGSGAWKRLKSMLRKDDAPLFLNDTSAFDFSDEAGDEGLSRFNKLRVVVADDGSEAPERPVNGAHPTLQADDDSLLDQDLPLTNSQLSLKVDSCDNCSKQREILKQRKVKARLTIAAVLYLLFMIGELVGGYIANSLAIMTDALHMLTDLSAIILTLLALWLSSKSPTKRFTFGFHRLEVLSAMISVLLVYILMGFLLYEAVQRTIHMNYEINGDIMLITAAVGVAVNVIMGFLLNQSGHRHSHSHSLPSNSPTRGSGCERNHGQDSLAVRAAFVHALGDLVQSVGVLIAAYIIRFKPEYKIADPICTYVFSLLVAFTTFRIIWDTVVIILEGVPSHLNVDYIKEALMKIEDVYSVEDLNIWSLTSGKSTAIVHIQLIPGSSSKWEEVQSKANHLLLNTFGMYRCTIQLQSYRQEVDRTCANCQSSSP

SEQ ID NO: 25 - DNA, 4526 bp, human organism
gccgagtcggtggcggctgcaggctgggagggagaagtgctacgcctttgcaggttggcgaagtggttccaggctacccggctagtctggcacggccccgtcttctgcctcctcctccgtcgcgtggcggcgggaactgttggccgcgcggcctcgggaacggcccaggtccccgcccgcaggtcccgggcagataacatagatcatcagtagaaaacttcttgaagttgttcaagaaaaatttgaaagtagcaaaatagaaaataaagaattaacagcagatacagaggacagcatggaagtgttgtcttaggaaacagaacacagcagtgaaaaaacagacaaaatccgctcagatacaactgcagctgataatgttttccggcttcaatgtctttagagttgggatctcttttgtcataatgtgcattttttacatgccaacagtaaactctttaccagaactgagtcctcagaaatattttagtacattgcaaccaggtcttgaagaactgaatgaggctgttagacctctgcaggactatggaatttcagttgccaaggttaattgtgtcaaagaagaaatatcaagatactgtggaaaagaaaaggatttgatgaaagcatatttattcaagggcaacatattgctcagagaattccctactgacaccttgtttgatgtgaatgccattgtcgcccatgttctctttgctcttctttttagtgaagtgaaatatattaccaacctggaagaccttcagaacatagaaaatgctctgaaaggaaaagcaaatattatattctcatatgtaagagccattggaataccagagcacagagcagtcatggaagccggttttgtgtatgggactacataccaatttgtcttaaccacagaaattgcccttttggaaagtattggctctgaggatgtggaatatgcacatctctacttttttcattgtaaactagtcttggacttgacccagcaatgtagaagaacactaatggaacagccattgactacactgaacattcacctgtttattaagacaatgaaagcacctctgttgactgaagttgctgaagatcctcaacaagtttcaactgtccatctccaactgggcttaccactggtttttattgttagccaacaggctacttatgaagctgatagaagaactgcagaatgggttgcttggcgtcttctgggaaaagcaggagttctactcttgttaagggactctttggaagtgaacattcctcaagatgctaatgtggtcttcaaaagagcagaagagggagttccagtggaatttttggtattacatgatgttgatttaataatatctcatgtggaaaataatatgcacattgaggaaatacaagaagatgaagacaatgacatggaaggtccagatatagatgttcaggatgatgaagtggcagaaactgttttcagagataggaagagaaaattacctttggaacttacagtggaactaacagaagaaacatttaatgcaacagtgatggcttctgacagcatagtactcttctatgctggttggcaagcagtatccatggcatttttgcaatcctatattgatgtggcagttaaactgaaaggcacatctactatgcttcttactagaataaactgtgcagattggtctgatgtatgtactaagcaaaatgttactgaatttcctatcataaagatgtacaagaaaggcgagaacccagtatcttatgctggaatgttaggaaccaaagatctcctaaaatttatccagctcaacaggatttcatatccagtgaatataacatcgatccaagaagcagaagaatatttaagtggggaattatataaagacctcatcttgtattctagtgtgtcagtattgggactatttagtccaaccatgaaaacagcaaaagaagattttagtgaagcaggaaactacctaaaaggatatgttatcactggaatttattctgaagaagatgttttgctactgtcaaccaaatatgctgcaagtcttccagccctgctgcttgccagacacacagaaggcaaaatagagagcatcccactagctagcacacatgcacaagacatagttcaaataataacagatgcactactggaaatgtttccggaaatcactgtggaaaatcttcccagttatttcagacttcagaaaccattattgattttgttcagtgatggcactgtaaatcctcaatataaaaaagcaatattgacactggtaaagcagaaatacttggattcatttactccatgctggttaaatctaaagaatactccagtggggagaggaatcttgcgggcatattttgatcctctgcctccccttcctcttcttgttttggtgaatctgcattcaggtggccaagtatttgcatttccttcagaccaggctataattgaagaaaaccttgtattgtggctgaagaaattagaagcaggactagaaaatcatatcacaattttacctgctcaagaatggaaacctcctcttccagcttatgattttctaagtatgatagatgccgcaacatctcaacgtggcactaggaaagttcccaagtgtatgaaagaaacagatgtgcaggagaatgataaggaacaacatgaagataaatcggcagtcagaaaagaaccgattgaaactctgagaataaagcattggaatagaagtaattggtttaaagaagcagaaaaatcatttagacgtgataaagagttaggatgctcaaaagtgaactaattttatagggctgtggtttccaaaatttttttggcatgatagacttaatttatttccttaaagaataatattaaatcatttcaagtttgcagactagtgccatccaatagaattataatataagtcacatattttatttaaaattttctagtaactacattaaacaaagtaaaagtgagcagggcaaaataattttgatattacttttcacccagtagtatacccaaaatagcgaaatatagaaattattaatgagatattttacatccttttttgtaccaagtcttctaaatgcagtacatattttatacttactgcatttcttacttccgagtagccatatttcaagtgttcattgccacatgtggcctgtgactactgtattggacagttcagtactagacaaaaactagcataattaacttagttctagccatgatttctatttggattaaaattaaactctaatcacagttaactccacagtgcattcatgcagctgacagttatatttgttttattggagtcatgatattaaaatcagcgtttgtcaacctcaggggatatttagcaattgtcgggagacatttttgatgtcatgactagggcagttattgacatttagtgagtagaggccatggatcctgctaaataacctgcattggacagcgccccacaacaaagaattatcctgcccgaaatggtagtcgtgccaaggctgagtaaccttgtgttaaaagtaacctgtggcagactaggtttccagaatttcctggttctgctcacgtatcatgtttgaaaaaattttggctattaaagatatgtattagatggtcttatcctgattattacctggatacaacttgatcttttctaatattttcagaaagtgatgggataaccctagaagaggactcagaatgatatttatattttaagtgagtcttaaaacctcctcttatttctacaagttatatggctaaatttcagattgaacagggattcagcattctgccatctcctcatggaaagagaggctccctcatctgaagcgtctctgaaatctacccttgcaagcttcagacaaatcagttgatctccctgagccacacggcctcattctgtgagggagggaaagattagccaaagagttaattttcattccaaatcacttagctgttagactgatctgtttgtagcagttgtttgtctcatttttgctctgtgcattttttgagacatttgttgagaatattctatttggtgctctactgtatttttctttttaatatctacttgatatcttgttctttaaattttcttcacatatggtttgcctgatacaactgatttttataactgaaatttaaggaatctaacagctaaaactcagtaagtgcatmtatttccttataacatagacccgttgctactctcagcaccctctcctcaattttttttcctgtagcatgtgatgcctgattaaactcattttcatttgcttttatttctaatatgggaacaatgagagtgaactctaaatataggttgtagtaataaaacatcattagcctaattattagaaaatgctaattaagtaccagcacatagaaacatgaaattgcttagtcattgtacctttgtcagcaattttgacagtcattaatgtttgtcataattttaaataaagtgtctgggtttcagaataccttcaaaaaaaaaaaaaaa

SEQ ID NO: 26 - protein, 807 aa, human organism
MFSGFNVFRVGISFVIMCIFYMPTVNSLPELSPQKYFSTLQPGLEELNEAVRPLQDYGISVAKVNCVKEEISRYCGKEKDLMKAYLFKGNILLREFPTDTLFDVNAIVAHVLFALLFSEVKYITNLEDLQNIENALKGKANIIFSYVRAIGIPEHRAVMEAGFVYGTTYQFVLTTEIALLESIGSEDVEYAHLYFFHCKLVLDLTQQCRRTLMEQPLTTLNIHLFIKTMKAPLLTEVAEDPQQVSTVHLQLGLPLVFIVSQQATYEADRRTAEWVAWRLLGKAGVLLLLRDSLEVNIPQDANVVFKRAEEGVPVEFLVLHDVDLIISHVENNMHIEEIQEDEDNDMEGPDIDVQDDEVAETVFRDRKRKLPLELTVELTEETFNATVMASDSIVLFYAGWQAVSMAFLQSYIDVAVKLKGTSTMLLTRINCADWSDVCTKQNVTEFPIIKMYKKGENPVSYAGMLGTKDLLKFIQLNRISYPVNITSIQEAEEYLSGELYKDLILYSSVSVLGLFSPTMKTAKEDFSEAGNYLKGYVITGIYSEEDVLLLSTKYAASLPALLLARHTEGKIESIPLASTHAQDIVQIITDALLEMFPEITVENLPSYFRLQKPLLILFSDGTVNPQYKKAILTLVKQKYLDSFTPCWLNLKNTPVGRGILRAYFDPLPPLPLLVLVNLHSGGQVFAFPSDQAIIEENLVLWLKKLEAGLENHITILPAQEWKPPLPAYDFLSMIDAATSQRGTRKVPKCMKETDVQENDKEQHEDKSAVRKEPIETLRIKHWNRSNWFKEAEKSFRRDKELGCSKVN

SEQ ID NO: 27 - DNA, 1195 bp, human organism
ccgagactcacggtcaagctaaggcgaagagtgggtggctgaagccatactattttatagaattaatggaaagcagaaaagacatcacaaaccaagaagaactttggaaaatgaagcctaggagaaatttagaagaagacgattatttgcataaggacacgggagagaccagcatgctaaaaagacctgtgcttttgcatttgcaccaaacagcccatgctgatgaatttgactgcccttcagaacttcagcacacacaggaactctttccacagtggcacttgccaattaaaatagctgctattatagcatctctgacttttctttacactcttctgagggaagtaattcaccctttagcaacttcccatcaacaatatttttataaaattccaatcctggtcatcaacaaagtcttgccaatggtttccatcactctcttggcattggtttacctgccaggtgtgatagcagcaattgtccaacttcataatggaaccaagtataagaagtttccacattggttggataagtggatgttaacaagaaagcagtttgggcttctcagtttcttttttgctgtactgcatgcaatttatagtctgtcttacccaatgaggcgatcctacagatacaagttgctaaactgggcatatcaacaggtccaacaaaataaagaagatgcctggattgagcatgatgtttggagaatggagatttatgtgtctctgggaattgtgggattggcaatactggctctgttggctgtgacatctattccatctgtgagtgactctttgacatggagagaatttcactatattcagagcaagctaggaattgtttcccttctactgggcacaatacacgcattgatttttgcctggaataagtggatagatataaaacaatttgtatggtatacacctccaacttttatgatagctgttttccttccaattgttgtcctgatatttaaaagcatactattcctgccatgcttgaggaagaagatactgaagattagacatggttgggaagacgtcaccaaaattaacaaaactgagatatgttcccagttgtagaattactgtttacacacatttttgttcaatattgatatattttatcaccaacatttcaagtttgtatttgttaataaaatgattattcaaggaaaaaaaaaaaaaaaaaa

SEQ ID NO: 28 - protein, 339 aa, human organism
MESRKDITNQEELWKMKPRRNLEEDDYLHKDTGETSMLKRPVLLHLHQTAHADEFDCPSELQHTQELFPQWHLPIKIAAIIASLTFLYTLLREVIHPLATSHQQYFYKIPILVINKVLPMVSITLLALVYLPGVIAAIVQLHNGTKYKKFPHWLDKWMLTRKQFGLLSFFFAVLHAIYSLSYPMRRSYRYKLLNWAYQQVQQNKEDAWIEHDVWRMEIYVSLGIVGLAILALLAVTSIPSVSDSLTWREFHYIQSKLGIVSLLLGTIHALIFAWNKWIDIKQFVWYTPPTFMIAVFLPIVVLIFKSILFLPCLRKKILKIRHGWEDVTKINKTEICSQL

SEQ ID NO: 29 - DNA, 2541 bp, human organism
atgagttcctgcaacttcacacatgccacctttgtgcttattggtatcccaggattagagaaagcccatttctgggttggcttccccctcctttccatgtatgtagtggcaatgtttggaaactgcatcgtggtcttcatcgtaaggacggaacgcagcctgcacgctccgatgtacctctttctctgcatgcttgcagccattgacctggccttatccacatccaccatgcctaagatccttgcccttttctggtttgattcccgagagattagctttgaggcctgtcttacccagatgttctttattcatgccctctcagccattgaatccaccatcctgctggccatggcctttgaccgttatgtggccatctgccacccactgcgccatgctgcagtgctcaacaatacagtaacagcccagattggcatcgtggctgtggtccgcggatccctcttttttttcccactgcctctgctgatcaagcggctggccttctgccactccaatgtcctctcgcactcctattgtgtccaccaggatgtaatgaagttggcctatgcagacactttgcccaatgtggtatatggtcttactgccattctgctggtcatgggcgtggacgtaatgttcatctccttgtcctattttctgataatacgaacggttctgcaactgccttccaagtcagagcgggccaaggcctttggaacctgtgtgtcacacattggtgtggtactcgccttctatgtgccacttattggcctctcagtggtacaccgctttggaaacagccttcatcccattgtgcgtgttgtcatgggtgacatctacctgctgctgcctcctgtcatcaatcccatcatctatggtgccaaaaccaaacagatcagaacacgggtgctggctatgttcaagatcagctgtgacaaggacttgcaggctgtgggaggcaagtgacccttaacactacacttctccttatctttattggcttgataaacataattatttctaacactagcttatttccagttgcccataagcacatcagtacttttctctggctggaatagtaaactaaagtatggtacatctacctaaaggactattatgtggaataatacatactaatgaagtattacatgatttaaagactacaataaaaccaaacatgcttataacattaagaaaaacaataaagatacatgattgaaaccaagttgaaaaatagcatatgccttggaggaaatgtgctcaaattactaatgatttagtgttgtccctactttctctctcttttttctttcttttttttttattatggttagctgtcacatacaactttttttttttttgagatggggtctcgctctgtcaccaggctggagtgcagtggcgcgatctcggctcactgcaacctccacatcccatgttgaagtaattcttctgcctcagcctcccgagtagctgggactagaggaacgtgccaccatgactggctaattttctgtattttttagtagagacagagtttcaccatgttggccaggatggtctcgatctcctgaccttgtgatccacccgcctcagcctcccaaagtgttgggattacaggtgtgaaccactgtgcccggcctgtgtacaactttttaaatagggaatatgatagcttcgcatggtggtgtgcacctatagcccccactgcctggaaagctgaggtgggagaatcgcttgagtccaggagtttgaggttacagtgatccacgatcgtaccactacactccagcctgggcaacagagcaagaccctgtctcaaagcataaaatggaataacatatcaaatgaaacagggaaaatgaagctgacaatttatggaagccagggcttgtcacagtctctactgttattatgcattacctgggaatttatataagcccttaataatartgccaatgaacatctcatgtgtgctcacaatgttctggcactattataagtgcttcacaggttttatgtgttcttcgtaactttatggagtaggtaccatttgtgtctctttattataagtgagagaaatgaagtttatattatcaaggggactaaagtcacacggcttgtgggcactgtgccaagatttaaaattaaatttgatggttgaatacagttacttaatgaccatgttatattgcttcctgtgtaacatctgccatttatttcctcagctgtacaaatcctctgttttctctctgttacacactaacatcaatggctttgtacttgtgatgagagataaccttgccctagttgtgggcaacacatgcagaataatcctgttttacagctgcctttcgtgatcttattgcttgcttttttccagattcagggagaatgttgttgtctatttgtctcttacatctccttgatcatgtcttcattttttaatgtgctctgtacctgtcaaaaattttgaatgtacaccacatgctattgtctgaacttgagtataagataaaataaaattttattttaaatttt

SEQ ID NO: 30 - protein, 320 aa, human organism
MSSCNFTHATFVLIGIPGLEKAHFWVGFPLLSMYVVAMFGNCIVVFIVRTERSLHAPMYLFLCMLAAIDLALSTSTMPKILALFWFDSREISFEACLTQMFFIHALSAIESTILLAMAFDRYVAICHPLRHAAVLNNTVTAQIGIVAVVRGSLFFFPLPLLIKRLAFCHSNVLSHSYCVHQDVMKLAYADTLPNVVYGLTAILLVMGVDVMFISLSYFLIIRTVLQLPSKSERAKAFGTCVSHIGVVLAFYVPLIGLSVVHRFGNSLHPIVRVVMGDIYLLLPPVINPIIYGAKTKQIRTRVLAMFKISCDKDLQAVGGK

SEQ ID NO: 31 - DNA, 1020 bp, human organism
atgaactgggagctgctgctgtggctgctggtgctgtgcgcgctgctcctgctcttggtgcagctgctgcgcttcctgagggctgacggcgacctgacgctactatgggccgagtggcagggacgacgcccagaatgggagctgactgatatggtggtgtgggtgactggagcctcgagtggaattggtgaggagctggcttaccagttgtctaaactaggagtttctcttgtgctgtcagccagaagagtgcatgagctggaaagggtgaaaagaagatgcctagagaatggcaatttaaaagaaaaagatatacttgttttgccccttgacctgaccgacactggttcccatgaagcggctaccaaagctgttctccaggagtttggtagaatcgacattctggtcaacaatggtggaatgtcccagcgttctctgtgcatggataccagcttggatgtctacagaaagctaatagagcttaactacttagggacggtgtccttgacaaaatgtgttctgcctcacatgatcgagaggaagcaaggaaagattgttactgtgaatagcatcctgggtatcatatctgtacctctttccattggatactgtgctagcaagcatgctctccggggtttttttaatggccttcgaacagaacttgccacatacccaggtataatagtttctaacatttgcccaggacctgtgcaatcaaatattgtggagaattccctagctggagaagtcacaaagactataggcaataatggagaccagtcccacaagatgacaaccagtcgttgtgtgcggctgatgttaatcagcatggccaatgatttgaaagaagtttggatctcagaacaacctttcttgttagtaacatatttgtggcaatacatgccaacctgggcctggtggataaccaacaagatggggaagaaaaggattgagaactttaagagtggtgtggatgcagactcttcttattttaaaatctttaagacaaaacatgactga

SEQ ID NO: 32 - protein, 339 aa, human organism
MNWELLLWLLVLCALLLLLVQLLRFLRADGDLTLLWAEWQGRRPEWELTDMVVWVTGASSGIGEELAYQLSKLGVSLVLSARRVHELERVKRRCLENGNLKEKDILVLPLDLTDTGSHEAATKAVLQEFGRIDILVNNGGMSQRSLCMDTSLDVYRKLIELNYLGTVSLTKCVLPHMIERKQGKIVTVNSILGIISVPLSIGYCASKHALRGFFNGLRTELATYPGIIVSNICPGPVQSNIVENSLAGEVTKTIGNNGDQSHKMTTSRCVRLMLISMANDLKEVWISEQPFLLVTYLWQYMPTWAWWITNKMGKKRIENFKSGVDADSSYFKIFKTKHD

SEQ ID NO: 33 - DNA, 1186 bp, human organism
aggaatctgcgctcgggttccgcagatgcagaggttgaggtggctgcgggactggaagtcatcgggcagaggtctcacagcagccaaggaacctggggcccgctcctcccccctccaggccatgaggattctgcagttaatcctgcttgctctggcaacagggcttgtagggggagagaccaggatcatcaaggggttcgagtgcaagcctcactcccagccctggcaggcagccctgttcgagaagacgcggctactctgtggggcgacgctcatcgcccccagatggctcctgacagcagcccactgcctcaagccccgctacatagttcacctggggcagcacaacctccagaaggaggagggctgtgagcagacccggacagccactgagtccttcccccaccccggcttcaacaacagcctccccaacaaagaccaccgcaatgacatcatgctggtgaagatggcatcgccagtctccatcacctgggctgtgcgacccctcaccctctcctcacgctgtgtcactgctggcaccagctgcctcatttccggctggggcagcacgtccagcccccagttacgcctgcctcacaccttgcgatgcgccaacatcaccatcattgagcaccagaagtgtgagaacgcctaccccggcaacatcacagacaccatggtgtgtgccagcgtgcaggaagggggcaaggactcctgccagggtgactccgggggccctctggtctgtaaccagtctcttcaaggcattatctcctggggccaggatccgtgtgcgatcacccgaaagcctggtgtctacacgaaagtctgcaaatatgtggactggatccaggagacgatgaagaacaattagactggacccacccaccacagcccatcaccctccatttccacttggtgtttggttcctgttcactctgttaataagaaaccctaagccaagaccctctacgaacattctttgggcctcctggactacaggagatgctgtcacttaataatcaacctggggttcgaaatcagtgagacctggattcaaattctgccttgaaatattgtgactctgggaatgacaacacctggtttgttctctgttgtatccccagccccaaagacagctcctggccatatatcaaggtttcaataaatatttgctaaatgagtg

SEQ ID NO: 34 - protein, 250 aa, human organism
MRILQLILLALATGLVGGETRIIKGFECKPHSQPWQAALFEKTRLLCGATLIAPRWLLTAAHCLKPRYIVHLGQHNLQKEEGCEQTRTATESFPHPGFNNSLPNKDHRNDIMLVKMASPVSITWAVRPLTLSSRCVTAGTSCLISGWGSTSSPQLRLPHTLRCANITIIEHQKCENAYPGNITDTMVCASVQEGGKDSCQGDSGGPLVCNQSLQGIISWGQDPCAITRKPGVYTKVCKYVDWIQETMKNN

SEQ ID NO: 35 - DNA, 1233 bp, human organism
ctaaagctctcttgctgcctagcctcctgccggcctcatcttcgcccagccaaccccgcctggagccctatggccaactgcgagttcagcccggtgtccggggacaaaccctgctgccggctctctaggagagcccaactctgtcttggcgtcagtatcctggtcctgatcctcgtcgtggtgctcgcggtggtcgtcccgaggtggcgccagacgtggagcggtccgggcaccaccaagcgctttcccgagaccgtcctggcgcgatgcgtcaagtacactgaaattcatcctgagatgagacatgtagactgccaaagtgtatgggatgctttcaagggtgcatttatttcaaaacatccttgcaacattactgaagaagactatcagccactaatgaagttgggaactcagaccgtaccttgcaacaagattcttctttggagcagaataaaagatctggcccatcagttcacacaggtccagcgggacatgttcaccctggaggacacgctgctaggctaccttgctgatgacctcacatggtgtggtgaattcaacacttccaaaataaactatcaatcttgcccagactggagaaaggactgcagcaacaaccctgtttcagtattctggaaaacggtttcccgcaggtttgcagaagctgcctgtgatgtggtccatgtgatgctcaatggatcccgcagtaaaatctttgacaaaaacagcacttttgggagtgtggaagtccataatttgcaaccagagaaggttcagacactagaggcctgggtgatacatggtggaagagaagattccagagacttatgccaggatcccaccataaaagagctggaatcgattataagcaaaaggaatattcaattttcctgcaagaatatctacagacctgacaagtttcttcagtgtgtgaaaaatcctgaggattcatcttgcacatctgagatctgagccagtcgctgtggttgttttagctccttgactccttgtggtttatgtcatcatacatgactcagcatacctgctggtgcagagctgaagattttggagggtcctccacaataaggtcaatgccagagacggaagcctttttccccaaagtcttaaaataacttatatcatcagcatacctttattgtgatctatcaatagtcaagaaaaattattgtataagattagaatgaaaattgtatgttaagttacttcctttag

SEQ ID NO: 36 - protein, 300 aa, human organism
MANCEFSPVSGDKPCCRLSRRAQLCLGVSILVLILVVVLAVVVPRWRQTWSGPGTTKRFPETVLARCVKYTEIHPEMRHVDCQSVWDAFKGAFISKHPCNITEEDYQPLMKLGTQTVPCNKILLWSRIKDLAHQFTQVQRDMFTLEDTLLGYLADDLTWCGEFNTSKINYQSCPDWRKDCSNNPVSVFWKTVSRRFAEAACDVVHVMLNGSRSKIFDKNSTFGSVEVHNLQPEKVQTLEAWVIHGGREDSRDLCQDPTIKELESIISKRNIQFSCKNIYRPDKFLQCVKNPEDSSCTSEI

SEQ ID NO: 37 - DNA, 3315 bp, human organism
atgtcctttcgggcagccaggctcagcatgaggaacagaaggaatgacactctggacagcacccggaccctgtactccagcgcgtctcggagcacagacttgtcttacagtgaaagcgacttggtgaattttattcaagcaaattttaagaaacgagaatgtgtcttctttaccaaagattccaaggccacggagaatgtgtgcaagtgtggctatgcccagagccagcacatggaaggcacccagatcaaccaaagtgagaaatggaactacaagaaacacaccaaggaatttcctaccgacgcctttggggatattcagtttgagacactggggaagaaagggaagtatatacgtctgtcctgcgacacggacgcggaaatcctttacgagctgctgacccagcactggcacctgaaaacacccaacctggtcatttctgtgaccgggggcgccaagaacttcgccctgaagccgcgcatgcgcaagatcttcagccggctcatctacatcgcgcagtccaaaggtgcttggattctcacgggaggcacccattatggcctgatgaagtacatcggggaggtggtgagagataacaccatcagcaggagttcagaggagaatattgtggccattggcatagcagcttggggcatggtctccaaccgggacaccctcatcaggaattgcgatgctgagggctattttttagcccagtaccttatggatgacttcacaagagatccactgtatatcctggacaacaaccacacacatttgctgctcgtggacaatggctgtcatggacatcccactgtcgaagcaaagctccggaatcagctagagaagtatatctctgagcgcactattcaagattccaactatggtggcaagatccccattgtgtgttttgcccaaggaggtggaaaagagactttgaaagccatcaatacctccatcaaaaataaaattccttgtgtggtggtggaaggctcgggccagatcgctgatgtgatcgctagcctggtggaggtggaggatgccctgacatcttctgccgtcaaggagaagctggtgcgctttttaccccgcacggtgtcccggctgcctgaggaggagactgagagttggatcaaatggctcaaagaaattctcgaatgttctcacctattaacagttattaaaatggaagaagctggggatgaaattgtgagcaatgccatctcctacgctctatacaaagccttcagcaccagtgagcaagacaaggataactggaatgggcagctgaagcttctgctggagtggaaccagctggacttagccaatgatgagattttcaccaatgaccgccgatgggagtctgctgaccttcaagaagtcatgtttacggctctcataaaggacagacccaagtttgtccgcctctttctggagaatggcttgaacctacggaagtttctcacccatgatgtcctcactgaactcttctccaaccacttcagcacgcttgtgtaccggaatctgcagatcgccaagaattcctataatgatgccctcctcacgtttgtctggaaactggttgcgaacttccgaagaggcttccggaaggaagacagaaatggccgggacgagatggacatagaactccacgacgtgtctcctattactcggcaccccctgcaagctctcttcatctgggccattcttcagaataagaaggaactctccaaagtcatttgggagcagaccaggggctgcactctggcagccctgggagccagcaagcttctgaagactctggccaaagtgaagaacgacatcaatgctgctggggagtccgaggagctggctaatgagtacgagacccgggctgttgagctgttcactgagtgttacagcagcgatgaagacttggcagaacagctgctggtctattcctgtgaagcttggggtggaagcaactgtctggagctggcggtggaggccacagaccagcatttcatcgcccagcctggggtccagaattttctttctaagcaatggtatggagagatttcccgagacaccaagaactggaagattatcctgtgtctgtttattatacccttggtgggctgtggctttgtatcatttaggaagaaacctgtcgacaagcacaagaagctgctttggtactatgtggcgttcttcacctcccccttcgtggtcttctcctggaatgtggtcttctacatcgccttcctcctgctgtttgcctacgtgctgctcatggatttccattcggtgccacacccccccgagctggtcctgtactcgctggtctttgtcctcttctgtgatgaagtgagacagtggtacgtaaatggggtgaattattttactgacctgtggaatgtgatggacacgctggggcttttttacttcatagcaggaattgtatttcggctccactcttctaataaaagctctttgtattctggacgagtcattttctgtctggactacattattttcactctaagattgatccacatttttactgtaagcagaaacttaggacccaagattataatgctgcagaggatgctgatcgatgtgttcttcttcctgttcctctttgcggtgtggatggtggcctttggcgtggccaggcaagggatccttaggcagaatgagcagcgctggaggtggatattccgttcggtcatctacgagccctacctggccatgttcggccaggtgcccagtgacgtggatggtaccacgtatgactttgcccactgcaccttcactgggaatgagtccaagccactgtgtgtggagctggatgagcacaacctgccccggttccccgagtggatcaccatccccctggtgtgcatctacatgttatccaccaacatcctgctggtcaacctgctggtcgccatgtttggctacacggtgggcaccgtccaggagaacaatgaccaggtctggaagttccagaggtacttcctggtgcaggagtactgcagccgcctcaatatccccttccccttcatcgtcttcgcttacttctacatggtggtgaagaagtgcttcaagtgttgctgcaaggagaaaaacatggagtcttctgtctgctgtttcaaaaatgaagacaatgagactctggcatgggagggtgtcatgaaggaaaactaccttgtcaagatcaacacaaaagccaacgacacctcagaggaaatgaggcatcgatttagacaactggatacaaagcttaatgatctcaagggtcttctgaaagagattgctaataaaatcaaatga

SEQ ID NO: 38 - protein, 1104 aa, human organism
MSFRAARLSMRNRRNDTLDSTRTLYSSASRSTDLSYSESDLVNFIQANFKKRECVFFTKDSKATENVCKCGYAQSQHMEGTQINQSEKWNYKKHTKEFPTDAFGDIQFETLGKKGKYIRLSCDTDAEILYELLTQHWHLKTPNLVISVTGGAKNFALKPRMRKIFSRLIYIAQSKGAWILTGGTHYGLMKYIGEVVRDNTISRSSEENIVAIGIAAWGMVSNRDTLIRNCDAEGYFLAQYLMDDFTRDPLYILDNNHTHLLLVDNGCHGHPTVEAKLRNQLEKYISERTIQDSNYGGKIPIVCFAQGGGKETLKAINTSIKNKIPCVVVEGSGQIADVIASLVEVEDALTSSAVKEKLVRFLPRTVSRLPEEETESWIKWLKEILECSHLLTVIKMEEAGDEIVSNAISYALYKAFSTSEQDKDNWNGQLKLLLEWNQLDLANDEIFTNDRRWESADLQEVMFTALIKDRPKFVRLFLENGLNLRKFLTHDVLTELFSNHFSTLVYRNLQIAKNSYNDALLTFVWKLVANFRRGFRKEDRNGRDEMDIELHDVSPITRHPLQALFIWAILQNKKELSKVIWEQTRGCTLAALGASKLLKTLAKVKNDINAAGESEELANEYETRAVELFTECYSSDEDLAEQLLVYSCEAWGGSNCLELAVEATDQHFIAQPGVQNFLSKQWYGEISRDTKNWKIILCLFIIPLVGCGFVSFRKKPVDKHKKLLWYYVAFFTSPFVVFSWNVVFYIAFLLLFAYVLLMDFHSVPHPPELVLYSLVFVLFCDEVRQWYVNGVNYFTDLWNVMDTLGLFYFIAGIVFRLHSSNKSSLYSGRVIFCLDYIIFTLRLIHIFTVSRNLGPKIIMLQRMLIDVFFFLFLFAVWMVAFGVARQGILRQNEQRWRWIFRSVIYEPYLAMFGQVPSDVDGTTYDFAHCTFTGNESKPLCVELDEHNLPRFPEWITIPLVCIYMLSTNILLVNLLVAMFGYTVGTVQENNDQVWKFQRYFLVQEYCSRLNIPFPFIVFAYFYMVVKKCFKCCCKEKNMESSVCCFKNEDNETLAWEGVMKENYLVKINTKANDTSEEMRHRFRQLDTKLNDLKGLLKEIANKIK

SEQ ID NO: 39 - DNA, 558 bp, human organism
atgcctcgcctgttcttgttccacctgctagaattctgtttactactgaaccaattttccagagcagtcgcggccaaatggaaggacgatgttattaaattatgcggccgcgaattagttcgcgcgcagattgccatttgcggcatgagcacctggagcaaaaggtctctgagccaggaagatgctcctcagacacctagaccagtggcagaaattgtaccatccttcatcaacaaagatacagaaactataattatcatgttggaattcattgctaatttgccaccggagctgaaggcagccctatctgagaggcaaccatcattaccagagctacagcagtatgtacctgcattaaaggattccaatcttagctttgaagaatttaagaaacttattcgcaataggcaaagtgaagccgcagacagcaatccttcagaattaaaatacttaggcttggatactcattctcaaaaaaagagacgaccctacgtggcactgtttgagaaatgttgcctaattggttgtaccaaaaggtctcttgctaaatattgctga

SEQ ID NO: 40 - protein, 185 aa, human organism
MPRLFLFHLLEFCLLLNQFSRAVAAKWKDDVIKLCGRELVRAQIAICGMSTWSKRSLSQEDAPQTPRPVAEIVPSFINKDTETIIIMLEFIANLPPELKAALSERQPSLPELQQYVPALKDSNLSFEEFKKLIRNRQSEAADSNPSELKYLGLDTHSQKKRRPYVALFEKCCLIGCTKRSLAKYC

SEQ ID NO: 41 - DNA, 3978 bp, human organism
atgctgcccgtgtaccaggaggtgaagcccaacccgctgcaggacgcgaacctctgctcacgcgtgttcttctggtggctcaatcccttgtttaaaattggccataaacggagattagaggaagatgatatgtattcagtgctgccagaagaccgctcacagcaccttggagaggagttgcaagggttctgggataaagaagttttaagagctgagaatgacgcacagaagccttctttaacaagagcaatcataaagtgttactggaaatcttatttagttttgggaatttttacgttaattgaggaaagtgccaaagtaatccagcccatatttttgggaaaaattattaattattttgaaaattatgatcccatggattctgtggctttgaacacagcgtacgcctatgccacggtgctgactttttgcacgctcattttggctatactgcatcacttatatttttatcacgttcagtgtgctgggatgaggttacgagtagccatgtgccatatgatttatcggaaggcacttcgtcttagtaacatggccatggggaagacaaccacaggccagatagtcaatctgctgtccaatgatgtgaacaagtttgatcaggtgacagtgttcttacacttcctgtgggcaggaccactgcaggcgatcgcagtgactgccctactctggatggagataggaatatcgtgccttgctgggatggcagttctaatcattctcctgcccttgcaaagctgttttgggaagttgttctcatcactgaggagtaaaactgcaactttcacggatgccaggatcaggaccatgaatgaagttataactggtataaggataataaaaatgtacgcctgggaaaagtcattttcaaatcttattaccaatttgagaaagaaggagatttccaagattctgagaagttcctgcctcagggggatgaatttggcttcgtttttcagtgcaagcaaaatcatcgtgtttgtgaccttcaccacctacgtgctcctcggcagtgtgatcacagccagccgcgtgttcgtggcagtgacgctgtatggggctgtgcggctgacggttaccctcttcttcccctcagccattgagagggtgtcagaggcaatcgtcagcatccgaagaatccagacctttttgctacttgatgagatatcacagcgcaaccgtcagctgccgtcagatggtaaaaagatggtgcatgtgcaggattttactgctttttgggataaggcatcagagaccccaactctacaaggcctttcctttactgtcagacctggcgaattgttagctgtggtcggccccgtgggagcagggaagtcatcactgttaagtgccgtgctcggggaattggccccaagtcacgggctggtcagcgtgcatggaagaattgcctatgtgtctcagcagccctgggtgttctcgggaactctgaggagtaatattttatttgggaagaaatacgaaaaggaacgatatgaaaaagtcataaaggcttgtgctctgaaaaaggatttacagctgttggaggatggtgatctgactgtgataggagatcggggaaccacgctgagtggagggcagaaagcacgggtaaaccttgcaagagcagtgtatcaagatgctgacatctatctcctggacgatcctctcagtgcagtagatgcggaagttagcagacacttgttcgaactgtgtatttgtcaaattttgcatgagaagatcacaattttagtgactcatcagttgcagtacctcaaagctgcaagtcagattctgatattgaaagatggtaaaatggtgcagaaggggacttacactgagttcctaaaatctggtatagattttggctcccttttaaagaaggataatgaggaaagtgaacaacctccagttccaggaactcccacactaaggaatcgtaccttctcagagtcttcggtttggtctcaacaatcttctagaccctccttgaaagatggtgctctggagagccaagatacagagaatgtcccagttacactatcagaggagaaccgttctgaaggaaaagttggttttcaggcctataagaattacttcagagctggtgctcactggattgtcttcattttccttattctcctaaacactgcagctcaggttgcctatgtgcttcaagattggtggctttcatactgggcaaacaaacaaagtatgctaaatgtcactgtaaatggaggaggaaatgtaaccgagaagctagatcttaactggtacttaggaatttattcaggtttaactgtagctaccgttctttttggcatagcaagatctctattggtattctacgtccttgttaactcttcacaaactttgcacaacaaaatgtttgagtcaattctgaaagctccggtattattctttgatagaaatccaataggaagaattttaaatcgtttctccaaagacattggacacttggatgatttgctgccgctgacgtttttagatttcatccagacattgctacaagtggttggtgtggtctctgtggctgtggccgtgattccttggatcgcaatacccttggttccccttggaatcattttcatttttcttcggcgatattttttggaaacgtcaagagatgtgaagcgcctggaatctacaactcggagtccagtgttttcccacttgtcatcttctctccaggggctctggaccatccgggcatacaaagcagaagagaggtgtcaggaactgtttgatgcacaccaggatttacattcagaggcttggttcttgtttttgacaacgtcccgctggttcgccgtccgtctggatgccatctgtgccatgtttgtcatcatcgttgcctttgggtccctgattctggcaaaaactctggatgccgggcaggttggtttggcactgtcctatgccctcacgctcatggggatgtttcagtggtgtgttcgacaaagtgctgaagttgagaatatgatgatctcagtagaaagggtcattgaatacacagaccttgaaaaagaagcaccttgggaatatcagaaacgcccaccaccagcctggccccatgaaggagtgataatctttgacaatgtgaacttcatgtacagtccaggtgggcctctggtactgaagcatctgacagcactcattaaatcacaagaaaaggttggcattgtgggaagaaccggagctggaaaaagttccctcatctcagccctttttagattgtcagaacccgaaggtaaaatttggattgataagatcttgacaactgaaattggacttcacgatttaaggaagaaaatgtcaatcatacctcaggaacctgttttgttcactggaacaatgaggaaaaacctggatccctttaatgagcacacggatgaggaactgtggaatgccttacaagaggtacaacttaaagaaaccattgaagatcttcctggtaaaatggatactgaattagcagaatcaggatccaattttagtgttggacaaagacaactggtgtgccttgccagggcaattctcaggaaaaatcagatattgattattgatgaagcgacggcaaatgtggatccaagaactgatgagttaatacaaaaaaaaatccgggagaaatttgcccactgcaccgtgctaaccattgcacacagattgaacaccattattgacagcgacaagataatggttttagattcaggaagactgaaagaatatgatgagccgtatgttttgctgcaaaataaagagagcctattttacaagatggtgcaacaactgggcaaggcagaagccgctgccctcactgaaacagcaaaacaggtatacttcaaaagaaattatccacatattggtcacactgaccacatggttacaaacacttccaatggacagccctcgaccttaactattttcgagacagcactgtga

SEQ ID NO: 42 - protein, 1325 aa, human organism
MLPVYQEVKPNPLQDANLCSRVFFWWLNPLFKIGHKRRLEEDDMYSVLPEDRSQHLGEELQGFWDKEVLRAENDAQKPSLTRAIIKCYWKSYLVLGIFTLIEESAKVIQPIFLGKIINYFENYDPMDSVALNTAYAYATVLTFCTLILAILHHLYFYHVQCAGMRLRVAMCHMIYRKALRLSNMAMGKTTTGQIVNLLSNDVNKFDQVTVFLHFLWAGPLQAIAVTALLWMEIGISCLAGMAVLIILLPLQSCFGKLFSSLRSKTATFTDARIRTMNEVITGIRIIKMYAWEKSFSNLITNLRKKEISKILRSSCLRGMNLASFFSASKIIVFVTFTTYVLLGSVITASRVFVAVTLYGAVRLTVTLFFPSAIERVSEAIVSIRRIQTFLLLDEISQRNRQLPSDGKKMVHVQDFTAFWDKASETPTLQGLSFTVRPGELLAVVGPVGAGKSSLLSAVLGELAPSHGLVSVHGRIAYVSQQPWVFSGTLRSNILFGKKYEKERYEKVIKACALKKDLQLLEDGDLTVIGDRGTTLSGGQKARVNLARAVYQDADIYLLDDPLSAVDAEVSRHLFELCICQILHEKITILVTHQLQYLKAASQILILKDGKMVQKGTYTEFLKSGIDFGSLLKKDNEESEQPPVPGTPTLRNRTFSESSVWSQQSSRPSLKDGALESQDTENVPVTLSEENRSEGKVGFQAYKNYFRAGAHWIVFIFLILLNTAAQVAYVLQDWWLSYWANKQSMLNVTVNGGGNVTEKLDLNWYLGIYSGLTVATVLFGIARSLLVFYVLVNSSQTLHNKMFESILKAPVLFFDRNPIGRILNRFSKDIGHLDDLLPLTFLDFIQTLLQVVGVVSVAVAVIPWIAIPLVPLGIIFIFLRRYFLETSRDVKRLESTTRSPVFSHLSSSLQGLWTIRAYKAEERCQELFDAHQDLHSEAWFLFLTTSRWFAVRLDAICAMFVIIVAFGSLILAKTLDAGQVGLALSYALTLMGMFQWCVRQSAEVENMMISVERVIEYTDLEKEAPWEYQKRPPPAWPHEGVIIFDNVNFMYSPGGPLVLKHLTALIKSQEKVGIVGRTGAGKSSLISALFRLSEPEGKIWIDKILTTEIGLHDLRKKMSIIPQEPVLFTGTMRKNLDPFNEHTDEELWNALQEVQLKETIEDLPGKMDTELAESGSNFSVGQRQLVCLARAILRKNQILIIDEATANVDPRTDELIQKKIREKFAHCTVLTIAHRLNTIIDSDKIMVLDSGRLKEYDEPYVLLQNKESLFYKMVQQLGKAEAAALTETAKQVYFKRNYPHIGHTDHMVTNTSNGQPSTLTIFETAL

SEQ ID NO: 43 - DNA, 1140 bp, human organism
atggggaaagtgtcctgctgtggcatgaaataaatgaaacagaaaatgatggcaagactgctaagaacatcctttgctttgctcttccttggcctctttggggtgctgggggcagcaacaatttcatgcagaaatgaagaagggaaagctgtggactggtttactttttataagttacctaaaagacaaaacaaggaaagtggagagactgggttagagtacctgtacctagactctacaactagaagctggaggaagagtgagcaactaatgaatgacaccaagagtgttttgggaaggacattacaacagctatatgaagcatatgcctctaagagtaacaacacagcctatctaatatacaatgatggagtccctaaacctgtgaattacagtagaaagtatggacacaccaaaggtttactgctgtggaacagagttcaagggttctggctgattcattccatccctcagtttcctccaattccggaagaaggctatgattatccacccacagggagacgaaatggacaaagtggcatctgcataactttcaagtacaaccagtatgaggcaatagattctcagctcttggtctgcaaccccaacgtctatagctgctccatcccagccacctttcaccaggagctcattcacatgccccagctgtgcaccagggccagctcatcagagattcctggcaggctcctcaccacacttcagtcggcccagggacaaaaattcctccattttgcaaagtcggattcttttcttgacgacatctttgcagcctggatggctcaacggctgaagacacacttgttaacagaaacctggcagcgaaaaagacaagagcttccttcaaactgctcccttccttaccatgtctacaatataaaagcaattaaattatcacgacactcttatttcagttcttatcaagatcacgccaagtggtgtatttcccaaaagggcaccaaaaatcgctggacatgtattggagacctaaatcggagtccacaccaagccttcagaagtggaggattcatttgtacccagaattggcaaatttaccaagcatttcaaggattagtattatactatgaaagctgtaagtaaacttggtgaaaggacacaggt

SEQ ID NO: 44 - protein, 357 aa, human organism
MMARLLRTSFALLFLGLFGVLGAATISCRNEEGKAVDWFTFYKLPKRQNKESGETGLEYLYLDSTTRSWRKSEQLMNDTKSVLGRTLQQLYEAYASKSNNTAYLIYNDGVPKPVNYSRKYGHTKGLLLWNRVQGFWLIHSIPQFPPIPEEGYDYPPTGRRNGQSGICITFKYNQYEAIDSQLLVCNPNVYSCSIPATFHQELIHMPQLCTRASSSEIPGRLLTTLQSAQGQKFLHFAKSDSFLDDIFAAWMAQRLKTHLLTETWQRKRQELPSNCSLPYHVYNIKAIKLSRHSYFSSYQDHAKWCISQKGTKNRWTCIGDLNRSPHQAFRSGGFICTQNWQIYQAFQGLVLYYESCK

SEQ ID NO: 45 - DNA, 2243 bp, human organism
cggtgccctggggtggaatatcccctacgaatttaaccaagcggactttaatgccactgtgcagttcatccaaaaccacttggatgacatggatgtcaaaaagggtgtctcctggaccaccatccgctacatgataggagagattcaatatggaggcagagtcactgacgactatgataagagattgttgaacacatttgctaaggtttggttcagtgaaaatatgtttggaccagatttcagtttttaccaaggatacaatattccaaaatgcagcacagtggataactatcttcagtatatccagagtttgcctgcctatgacagccctgaggtgtttgggctgcaccccaatgctgacatcacctaccagagcaagctggccaaggacgtgctggacaccatcctaggcatccaacccaaggacacctctggtggaggggatgagacccgggaggcggtggtggcccggctggctgatgatatgctggagaagctgcccccagactatgtcccctttgaagtaaaagagaggctgcagaagatggggccattccagcctatgaacattttcctcaggcaggaaatagacagaatgcaaagggtactcagccttgtccgcagcaccctcactgagctgaaacttgctattgatggcaccatcatcatgagcgaaaatctgcaagatgcattggattgcatgtttgatgctagaatccctgcttggtggaaaaaagcttcttgggtttttagtacactgggtttctggtttactgaacttatagaaagaaacagccagtttacctcgtgggttttcaatggccgacctcactgcttttggatgacgggtttttttaacccccagggatttttaactgcaatgcgacaggaaataactcgggccaacaaaggctgggctctggacaatatggtgctttgcaatgaagtcaccaaatggatgaaggacgacatttctacccctcccacagagggtgtctatgtctatggcttatatcttgaaggtgctggctgggacaagaggaacatgaaactcattgaatcaaagccaaaagtgctctttgagttgatgcctgtcataaggatttatgcagaaaacaatactttacgagatcctcggttttactcctgtcccatctataagaagccagttcgaacggacttgaactacattgccgctgtggatctcaggacagcccagacccctgaacactgggtgctccgtggggttgcccttctgtgtgatgtcaagtaacatgtggggagtgtccccacccaatgctttggaaaatgcaagatctaaattattgtaacctttatttctgtatgactgctggacagtgtatgttaggtcgtttatgcaattaatgagctgcataggttttccccactccttaattggatgcttatattttacttgtttcatcattagtgaccaatgtctgagtttgttgaaaatgttatttagtgatataaaagtaaatttacagcatcctaatgaagtgtggccctcaaatccacagtagtatattttcttcttacttcgctccgaagactgactgtgattataacagcaaatatatttgcatgtggacaaagattagatggcaagatagaaaaataagaacagatgtgatagcaagaattatagttggcttgaaaaaatgtgatgatcaggagaaaaaataaaaaaagggtagaaatattagacggtgcgtagggactttctatggacttttattaattaggaaacattatcaaaggaacttttcacgtatttttctttaaattctggttagatgttattaataattcttcatctaacctactgactagaaaatatagtcagtactaaattagaattgtggtttataaacttttggttagctctggatctgtataactgcatttttttggataaacagtttttggtaggtggataccgggagacaagtgtgggtccctctcactgggcttcattctgtggaccaggatcattatttcatgctcatgatcatgagagttaggactgagtggctcctgtgactcccaccatcttagatgatactgttttcttgtgagttctttcttttggtgtggattagtatatcagttgatttgtgtgaattgtggtgaaacaatcatttcattttgaaaagcaagtaatgaaaatgtcagcatcataggaattaataaaatgtttttactaaaaaaaaaaaaaaaaa

SEQ ID NO: 46 - protein, 394 aa, human organism [sequence omitted]

SEQ ID NO: 47 - DNA, 6041 bp, human organism
ggagcagcctacaacttcacaaccagaaaccactacccctcaggggttgctttcagataaagatgacatgggaaggagaaatgctggcatagatttcggatccagaaaagcatcagcagcacagcccatacctgaaaacatggacaattccatggttagtgatccacaaccataccatgaagatgcagcttctggagctgagaagacagaagccagagcttctctctcactgatggtggaaagcctttctacaacccaagaggaggccattctctcagtagcagcagaggctcaggtgtttatgaatccttctcatatccagttagaagatcaagaagctttcagctttgatttacaaaaggcccaatccaaaatggagtcagcccaggatgttcaaactatctgcaaagaaaagccttctggaaatgttcaccagacctttacagcaagtgttttgggtatgacaagtactacagccaaaggagatgtttatgccaagactctgcctcccagaagcctttttcagtcctcaaggaagcctgatgctgaagaagtctcctcagattcagagaatattcctgaggagggggatggttctgaagaactggctcatggtcactcttcccagtccttggggaagtttgaagatgaacaagaagtcttctcagaatcaaaaagttttgttgaggacttgagcagctctgaggaggagctggacctcagatgcctctcccaggctttagaggagcctgaagatgcagaagtcttcacagaatcaagcagttatgttgaaaagtacaacacttctgatgattgcagcagctcagaggaagacctgcctctcagacaccctgctcaggccttgggaaagcccaaaaaccaacaagaagtctcctctgcttcaaataatactcctgaagagcagaatgattttatgcagcagctgccttccagatgcccttctcagcccattatgaatcctactgttcagcaacaagtccccaccagttcagtgggcacttctataaaacagagcgattccgtggagccaatccctccaagacaccctttccagccatgggtgaaccctaaagtggagcaagaagtttcctcatctccaaagagcatggctgttgaagagagcatttctatgaagcctctgcctcctaaacttctttgccagcccttgatgaatcctaaagttcaacaaaacatgttctcaggttcagaggacattgctgttgagagagtcatttctgtggagccactactccccagatattctcctcagtccttgacagatcctcaaatccggcaaatctcagaaagcacagctgttgaggaaggcacttatgtggaaccgctgcctcccagatgcctttcccagccctcggagaggcctaagttcctggactcaatgagtacttctgcagaatggagcagtcctgtggcaccaacaccttccaaatacacttccccgccatgggtgacccctaaatttgaggaactgtatcaactctctgcacatccagaaagcactactgttgaagaggacatttctaaggagcagctgcttcccagacatctttcccagttgactgtgggaaataaagtccagcaactgtcctcaaatttcgagcgggctgctattgaggcagacatttctgggagtccattgcctccccaatatgctacccagttcttaaagaggtctaaagttcaggaaatgacctcacgactagagaaaatggctgttgaaggcacttctaacaaatcaccgattcccaggcgtccgacccagtcattcgtgaaatttatggcacagcaaatcttttcagagagctctgctcttaagaggggcagtgatgtggcacctctgcctcccaatcttccttccaaatctttatcaaagcctgaagtcaagcaccaagttttctcagattcagggagtgctaatcctaagggaggcatttcttcaaagatgctacctatgaagcaccctttacagtccttggggaggcctgaagacccacagaaagttttctcttattcagagagagctcctgggaagtgcagcagttttaaagagcagctgtctcccaggcagctttcccaggccttgaggaaacctgagtatgagcaaaaagtctcccctgtttctgccagttctcctaaagagtggaggaattctaaaaagcagctgcctcccaaacattcttcccaagcctcagataggtctaaattccagccacagatgtcatcaaagggcccagtgaatgtacctgtaaagcagagcagcggtgagaagcacctgccttcaagtagtcctttccagcaacaggttcattcaagttctgtgaatgctgctgctaggcgatctgtttttgagagcaattctgacaattggttcctaggaagagatgaagcttttgcaatcaaaaccaagaaattcagccaaggttccaaaaaccccataaagagcattccagcccctgctaccaaacctgggaagttcaccattgctcctgtcaggcaaacatccacttctgggggcatttactctaagaaagaagatcttgagagtggtgatggtaataataaccagcatgcaaacctatccaatcaggatgatgttgaaaagctttttggagttcgactgaaaagagcccctccctcgcagaagtataagagtgagaaacaagataacttcacccagcttgcttcagtgccctcgggcccaatttcatcctctgtaggcaggggacataaaatcagaagcacttcccaggggctcctggatgctgcagggaacctcaccaaaatatcttacgttgcagataagcaacagagcaggcccaaatctgaaagcatggccaagaagcaacctgcttgcaagaccccaggaaagcctgctggtcaacagtcagattatgctgtctcagagccggtttggataactatggcaaagcagaagcagaagagtttcaaggcccacatttctgtgaaagagctgaaaactaagagcaatgctggagccgatgctgagactaaggagcctaaatatgagggagctggctctgcaaatgaaaaccaacctaaaaagatgttcacttccagtgtccataaacaggagaagacagcacagatgaagccacctaagcctacaaaatcagttggatttgaagctcagaagatactgcaagttcctgccatggaaaaagaaaccaaacgatcttcaactctcccagccaagttccagaacccagttgagccaattgagcctgtctggttctcactggccaggaagaaagccaaagcatggagccacatggcagaaatcacgcaataaagagctcttgtgtggagcatcagcatttattttatttagttttttttttttttttttttttgagacagagtctcgctctgttacccagattggagtgcagtggcgcgatctccgctcactgcaagctccgcctcccgggttcacgccactctcccgcctcagtctcccgactagctgggactacaggcgcccgccatcacgcccggctaattttgttttcgtatttttagtagagacggggtttcaccatgttggccaggatggtcttgatctcctgacctcgtgatccgcccgcctcagcctcccaaaagctgggattacaggcgtgagccaccgcgcccggccaagcatcagcgttttaaatgataattgctaatagctgtattaattctatgtagtgatctttttactgtgaccacttgtattaagcaaaataagtattaagcaaactaagaatttattaagcaaaataagaatttattaagcaaaatagccttagaaatgcaaattaaaacataattatttgaatgaaataaatgccatgaatgcttaaccttccacgtagtcactgccagcacccagaaacccagcatttcctctattaaaactatcgaaaacatttgcactgctgtaaaattgcaaaatctttaactttggacaatgtgctttagaagggagaaagcaaaaacattttgttggagcaactagaaaattgtcatttccctcaaccaaataaagtaattctaatggaaacattcagatgatttgacctaaagattggcctttaggttttatgagcctagatagatgccgcaattatttggttgttgctctaagctttgcaagggatcctaaaagaggcggtggaagtgaaaattctgggtctccaagaaaatttctgcacagccagttctccaatcagcctatcaccccttgaaacatcttccctgtgtccctgggggcccctgatgctttctccttgggtgatagtaacatgcagagcacttacacaaagctccctctttggacataccccacgtcgacctgtcacaggcctggctgtagcgagcacctccctatgacgcagaatgcttcttgggaattatcttactcctctggagggttagtccatcaatgttttgcttcttgtcccaatactactgtgaccctctctgatcgcacagaaatcactgcctatcacatatatcctgttaagcactgaagaccctattgaaattagagttctacagatgccaaaagctgtactttccatcaggcagatggcaagcttactgccttgatgcacatctggagccactggagctccttcctctctggttccagcattaaggtggagaactccatgtagcttcttgtcctttcccctcagctgtctttgcttcacaaggttttagcccaaagcaagagtgcaatcccaaagccacagagaaatgaactttccgctacctggaagctttaagtgagtaaatcagcttttcccctctcattcctagaggcacacacctcaaaagttactaggctggagagaccctaccttccagtgacccactcatcccccagccacggagaagagggaagaccaaaaagggagagtgagaaagaggatgagagggatggtcagctgtgaggggagggggcaagtggcccagcaaatgttgatgcctcccttcccatcttgccacacggtctttttcttttgtagcacagcctccattaataactcctcggctgaggatgaagatgtaggcacctttacccccagagccagttccttaattggctggctttctgagatgcagaccaccctagaatctcatctaggttcactagaagttagttaaatcttcctttctctgtctttctcttcattccatcccccaaacccaccaaacactaagggagagctccctttggatgtctgggcagtaaacctagctcatttttctaggagacccagaagtgacttctgagtagttatcactgtgtctgcctctgttacactgtgctgctttgcttaaacagaaatgcaggcctggacatctgactgtgcctttatattctgagtggggtgctgccccatgcaaaaaaatccagagaggtagtgaggtgtcagagctaaacacttggtgctgggttttgttgatgctggtataatgtgacacagtacaattacatgctaaattttgcattttctctatataacatctatttttcctgatactgtgcctttgccattttgataatgctattttgattgagtgaattttatttcctttgtattcccatagtgaacaatatattaaggtagatgccctttatctgggtactcctggtagattagctgttacacctcccttcccttttttacagtgaacctgtattcagttattgtcactctgagaactctccaataacaatttcttttccacagttaacaacacagctgttacacctcccttcctttttttcacagtgaacctgtattcagctattctcactctgagaactctccaataacaatttcttttccacagttaacaacaaagttctgtttttaaatgaagagattaagttctttttaaatgcctaaaggcatattctgacaacttttctacttctttaacttttttgatttaagatatatgcaaagcaaataaattcaataaagcct

SEQ ID NO: 48 - protein, 1115 aa, human organism
EQPTTSQPETTTPQGLLSDKDDMGRRNAGIDFGSRKASAAQPIPENMDNSMVSDPQPYHEDAASGAEKTEARASLSLMVESLSTTQEEAILSVAAEAQVFMNPSHIQLEDQEAFSFDLQKAQSKMESAQDVQTICKEKPSGNVHQTFTASVLGMTSTTAKGDVYAKTLPPRSLFQSSRKPDAEEVSSDSENIPEEGDGSEELAHGHSSQSLGKFEDEQEVFSESKSFVEDLSSSEEELDLRCLSQALEEPEDAEVFTESSSYVEKYNTSDDCSSSEEDLPLRHPAQALGKPKNQQEVSSASNNTPEEQNDFMQQLPSRCPSQPIMNPTVQQQVPTSSVGTSIKQSDSVEPIPPRHPFQPWVNPKVEQEVSSSPKSMAVEESISMKPLPPKLLCQPLMNPKVQQNMFSGSEDIAVERVISVEPLLPRYSPQSLTDPQIRQISESTAVEEGTYVEPLPPRCLSQPSERPKFLDSMSTSAEWSSPVAPTPSKYTSPPWVTPKFEELYQLSAHPESTTVEEDISKEQLLPRHLSQLTVGNKVQQLSSNFERAAIEADISGSPLPPQYATQFLKRSKVQEMTSRLEKMAVEGTSNKSPIPRRPTQSFVKFMAQQIFSESSALKRGSDVAPLPPNLPSKSLSKPEVKHQVFSDSGSANPKGGISSKMLPMKHPLQSLGRPEDPQKVFSYSERAPGKCSSFKEQLSPRQLSQALRKPEYEQKVSPVSASSPKEWRNSKKQLPPKHSSQASDRSKFQPQMSSKGPVNVPVKQSSGEKHLPSSSPFQQQVHSSSVNAAARRSVFESNSDNWFLGRDEAFAIKTKKFSQGSKNPIKSIPAPATKPGKFTIAPVRQTSTSGGIYSKKEDLESGDGNNNQHANLSNQDDVEKLFGVRLKRAPPSQKYKSEKQDNFTQLASVPSGPISSSVGRGHKIRSTSQGLLDAAGNLTKISYVADKQQSRPKSESMAKKQPACKTPGKPAGQQSDYAVSEPVWITMAKQKQKSFKAHISVKELKTKSNAGADAETKEPKYEGAGSANENQPKKMFTSSVHKQEKTAQMKPPKPTKSVGFEAQKILQVPAMEKETKRSSTLPAKFQNPVEPIEPVWFSLARKKAKAWSHMAEITQ

SEQ ID NO: 49 - DNA, 5976 bp, human organism
gctttcctttctaaagtagaagaggatgattatccctctgaagaactactagaggatgaaaacgctataaatgcaaaacggtctaaagaaaaaaaccctgggaatcagggcaggcagtttgatgttaatctgcaagtccctgacagagcagttttagggaccattcatccagatccagaaattgaagaaagcaagcaagaaactagtatgattttggatagtgaaaaaacaagtgagactgctgccaaaggggtcaacacaggaggcagggaaccaaatacaatggtggaaaaagaacgccctctggcagataagaaagcacagagaccatttgaacgaagtgacttttctgacagcataaaaattcagactccagaattaggtgaagtgtttcagaataaagattctgattatctgaagaacgacaaccctgaggaacatctgaagacctcagggcttgcaggggagcctgagggagaactctcaaaagaggaccatgggaacacagagaagtacatgggcacagaaagccaggggtctgctgctgcagaacctgaagatgactcgttccactggactccacatacaagtgtagagccagggcatagtgacaagagggaggacttacttatcataagcagcttctttaaagaacaacagtctttgcagcggttccagaagtactttaatgtccatgagctggaagccttgctacaagaaatgtcatcaaaactgaagtcagcgcagcaggagagcctgccctataatatggaaaaagtcctagataaggtcttccgtgcttctgagtcacaaattctgagcatagcagaaaaaatgcttgatactcgtgtggctgaaaatagagatctgggaatgaacgaaaataacatatttgaagaggctgcagtgcttgatgacattcaagacctcatctattttgtcaggtacaagcactccacagcagaggagacagccacactggtgatggcaccacctctagaggaaggcttgggtggagcaatggaagagatgcaaccactgcatgaagataatttctcacgagagaagacagcagaacttaatgtgcaggttcctgaagaacccacccacttggaccaacgtgtgattggggacactcatgcctcagaagtgtcacagaagccaaatactgagaaagacctggacccagggccagttacaacagaagacactcctatggatgctattgatgcaaacaagcaaccagagacagccgccgaagagccggcaagtgtcacacctttggaaaacgcaatccttctaatatattcattcatgttttatttaactaagtcgctagttgctacattgcctgatgatgttcagcctgggcctgatttttatggactgccatggaaacctgtatttatcactgccttcttgggaattgcttcgtttgccattttcttatggagaactgtccttgttgtgaaggatagagtatatcaagtcacggaacagcaaatttctgagaagttgaagactatcatgaaagaaaatacagaacttgtacaaaaattgtcaaattatgaacagaagatcaaggaatcaaagaaacatgttcaggaaaccaggaaacaaaatatgattctctctgatgaagcaattaaatataaggataaaatcaagacacttgaaaaaaatcaggaaattctggatgacacagctaaaaatcttcgtgttatgctagaatctgagagagaacagaatgtcaagaatcaggacttgatatcagaaaacaagaaatctatagagaagttaaaggatgttatttcaatgaatgcctcagaattttcagaggttcagattgcacttaatgaagctaagcttagtgaagagaaggtgaagtctgaatgccatcgggttcaagaagaaaatgctaggcttaagaagaaaaaagagcagttgcagcaggaaatcgaagactggagtaaattacatgctgagctcagtgagcaaatcaaatcatttgagaagtctcagaaagatttggaagtagctcttactcacaaggatgataatattaatgctttgactaactgcattacacagttgaatctgttagagtgtgaatctgaatctgagggtcaaaataaaggtggaaatgattcagatgaattagcaaatggagaagtgggaggtgaccggaatgagaagatgaaaaatcaaattaagcagatgatggatgtctctcggacacagactgcaatatcggtagttgaagaggatctaaagcttttacagcttaagctaagagcctccgtgtccactaaatgtaacctggaagaccaggtaaagaaattggaagatgaccgcaactcactacaagctgccaaagctggactggaagatgaatgcaaaaccttgaggcagaaagtggagattctgaatgagctctatcagcagaaggagatggctttgcaaaagaaactgagtcaagaagagtatgaacggcaagaaagagagcacaggctgtcagctgcagatgaaaaggcagtttcggctgcagaggaagtaaaaacttacaagcggagaattgaagaaatggaggatgaattacagaagacagagcggtcatttaaaaaccagatcgctacccatgagaagaaagctcatgaaaactggctcaaagctcgtgctgcagaaagagctatagctgaagagaaaagggaagctgccaatttgagacacaaattattagaattaacacaaaagatggcaatgctgcaagaagaacctgtgattgtaaaaccaatgccaggaaaaccaaatacacaaaaccctccacggagaggtcctctgagccagaatggctcttttggcccatcccctgtgagtggtggagaatgctcccctccattgacagtggagccacccgtgagacctctctctgctactctcaatcgaagagatatgcctagaagtgaatttggatcagtggacgggcctctacctcatcctcgatggtcagctgaggcatctgggaaaccctctccttctgatccaggatctggtacagctaccatgatgaacagcagctcaagaggctcttcccctaccagggtactcgatgaaggcaaggttaatatggctccaaaagggccccctcctttcccaggagtccctctcatgagcacccccatgggaggccctgtaccaccacccattcgatatggaccaccacctcagctctgcggaccttttgggcctcggccacttcctccaccctttggccctggtatgcgtccaccactaggcttaagagaatttgcaccaggcgttccaccaggaagacgggacctgcctctccaccctcggggatttttacctggacacgcaccatttagacctttaggttcacttggcccaagagagtactttattcctggtacccgattaccacccccaacccatggtccccaggaatacccaccaccacctgctgtaagagacttactgccgtcaggctctagagatgagcctccacctgcctctcagagcactagccaggactgttcacaggctttaaaacagagcccataaaactatgacctctgaggtttcattggaaagaaagtgtactgtgcattatccattacagtaaaggatttcattggcttcaaaatccaaaagtttattttaaaaggtttgttgttagaactaagctgccttggcagtgtgcatttttgagccaaacaattcaaaaatgtcatttcttccctaaataaaaatcaccttttaagctagagcgtccttacaactttgaaatgtgcaataaagaatacctgtgttttagctaatgtagcatatgtaattgcaaaatgatttagaatgtcatgaaaaatatgaacatttcctgtggaaatgctttaagaacatgtatttccattatcctatttttagtgtacaccagctgaatacggagcaatggtgtttataagcgtttttttaaactatctggtcacaaagactgttacgctaaaaatgtttactaaaagatcactaaactatctcccctcttgctgaagttctttgtagtaatagctcataaaaatttgtttattaatatttcccaagtgtctgttgactcattggactgttatgaggcttgtgccatttggggaacatgtaaactcaggctcccagaactgaagatggtggctggtggcacacttccggctgctcctccgtcacctgtgaactctacaagtgatgtctttttatttcaaagaagtttatttcccacttgtatagcattcacatgctttctttacgatcctcattgtctatttgagaatggttttctgagagtgagtttacattagtagcaagagttgtttgacctgatgttccattgtttttaccattcctgtagaaaaagggtgcacaacagaaaaatgaaaatgatgtgtcatggccataaaagtatagaaatctttaaaaattttaaaatgtacagtcccttatctatctttcccattccttgccactgatttttgaggaatataataaaaagattggaagagtataatgccatgagaaagaatgatttaggactgtgagggttataacatgccctaggtcagcaaccaagggttgaaatcagttctgttttagggggaaatggggggggcgacagatattattccaaaattaatattaattaatatttaaacgttggtgtttttatttaaaaatcagtaactaaccatctggaattgcaccatacttaaagtcttatccattactacactgtctttaaaacaatgtttctttaaatactctacaacgtttctaagaacgaacttcagacattttaattacagtaataatagcactccttttaaggagtttcagatccacactaaaactaaaatcataaaaggctgatacttttgtttgctgctaggctatattcttccattctttgaagtcctatgatgtaatatttttgaaacctagtgtatgtcttgtcactgttgtgatatttaatcgattaagaataccttgtaaaaaggagcaaaagcttcaatgtgaaacaattttctctctttatactaaacaactgaagatagatagtttagaaagataaggacctttgaaagaagacaactctgtcaaagttcataaggaatataaaaattcttcaggaaaagagaattcaatctatatgtcctcccgtttaatatcaagaatagaagaaattaagaggaaaactccacagaagagcataggccacttttagccatgtaaaaataagattaagtcacaaatacaacttttgaatttacctgtcaatatctctttaggacacaaaacaatgctgaagttaatataatttctaattttaaatgtcatttaagtgtagattatgccatctaggaaggtaagtaggaaaggtaaattaaatctatttttaaaattcaaaatattagagtatttttcccctctaaagccttttttggtgattattctgtatctgacataattgagaaactggtaagctgtaaagattccagtgtagcttctctgagaagttgtgagccagtccataactgcttcctcacatccatctgattgcaccatttctgcagcaaaccccaaagcagggtgccaatatgcagatggcatagggagtatcatccctcagccaaatcacttttccatctctaaagtttcatctattttggaagtcatctccaactaattgtgtctggatttagttgctaaaattgtcttatttatttatgaagcagcaatattcagcctgaaagcatttctgccatagttgttgtagttatatcgccaatggctgatttttttcattggaaagtaaatttaagtaattcgtgggatgtggtatattctgtgtcaacttcaagataatcactcattttctcgttatattcaggtctgaattaaagttaagttaatcac

SEQ ID NO: 50 - protein, 1193 aa, human organism
AFLSKVEEDDYPSEELLEDENAINAKRSKEKNPGNQGRQFDVNLQVPDRAVLGTIHPDPEIEESKQETSMILDSEKTSETAAKGVNTGGREPNTMVEKERPLADKKAQRPFERSDFSDSIKIQTPELGEVFQNKDSDYLKNDNPEEHLKTSGLAGEPEGELSKEDHGNTEKYMGTESQGSAAAEPEDDSFHWTPHTSVEPGHSDKREDLLIISSFFKEQQSLQRFQKYFNVHELEALLQEMSSKLKSAQQESLPYNMEKVLDKVFRASESQILSIAEKMLDTRVAENRDLGMNENNIFEEAAVLDDIQDLIYFVRYKHSTAEETATLVMAPPLEEGLGGAMEEMQPLHEDNFSREKTAELNVQVPEEPTHLDQRVIGDTHASEVSQKPNTEKDLDPGPVTTEDTPMDAIDANKQPETAAEEPASVTPLENAILLIYSFMFYLTKSLVATLPDDVQPGPDFYGLPWKPVFITAFLGIASFAIFLWRTVLVVKDRVYQVTEQQISEKLKTIMKENTELVQKLSNYEQKIKESKKHVQETRKQNMILSDEAIKYKDKIKTLEKNQEILDDTAKNLRVMLESEREQNVKNQDLISENKKSIEKLKDVISMNASEFSEVQIALNEAKLSEEKVKSECHRVQEENARLKKKKEQLQQEIEDWSKLHAELSEQIKSFEKSQKDLEVALTHKDDNINALTNCITQLNLLECESESEGQNKGGNDSDELANGEVGGDRNEKMKNQIKQMMDVSRTQTAISVVEEDLKLLQLKLRASVSTKCNLEDQVKKLEDDRNSLQAAKAGLEDECKTLRQKVEILNELYQQKEMALQKKLSQEEYERQEREHRLSAADEKAVSAAEEVKTYKRRIEEMEDELQKTERSFKNQIATHEKKAHENWLKARAAERAIAEEKREAANLRHKLLELTQKMAMLQEEPVIVKPMPGKPNTQNPPRRGPLSQNGSFGPSPVSGGECSPPLTVEPPVRPLSATLNRRDMPRSEFGSVDGPLPHPRWSAEASGKPSPSDPGSGTATMMNSSSRGSSPTRVLDEGKVNMAPKGPPPFPGVPLMSTPMGGPVPPPIRYGPPPQLCGPFGPRPLPPPFGPGMRPPLGLREFAPGVPPGRRDLPLHPRGFLPGHAPFRPLGSLGPREYFIPGTRLPPPTHGPQEYPPPPAVRDLLPSGSRDEPPPASQSTSQDCSQALKQSP

SEQ ID NO: 51 - DNA, 3287 bp, human organism
agactgaggcggaggcagccccgcgccgcgccggacccgagcatatttcattttctgtcattggactttgagccattagaaccatgagcaactacagtgtgtcactggttggcccagctccttggggtttccggctgcagggcggtaaggatttcaacatgcctctgacaatctctagtctaaaagatggcggcaaggcagcccaggcaaatgtaagaataggcgatgtggttctcagcattgatggaataaatgcacaaggaatgactcatcttgaagcccagaataagattaagggttgtacaggctctttgaatatgactctgcaaagagcatctgctgcacccaagcctgagccggttcctgttcaaaagggagaacctaaagaagtagttaaacctgtgcccattacatctcctgctgtgtccaaagtcacttccacaaacaacatggcctacaataaggcaccacggccttttggttctgtgtcttcaccaaaagtcacatccatcccatcaccatcgtctgccttcaccccagcccatgcgaccacctcatcacatgcttccccttcacccgtggctgccgtcactcctcccctgttcgctgcatctggactgcatgctaatgccaatcttagtgctgaccagtctccatctgcactgagcgctggtaaaactgcagttaatgtcccacggcagcccacagtcaccagcgtgtgttccgagacttctcaggagctagcagagggacagagaagaggatcccagggtgacagtaaacagcaaaatggcccaccaagaaaacacattgtggagcgctatacagagttttatcatgtacccactcacagtgatgccagcaagaagagactgattgaggatactgaagactggcgtccaagaactggaacaactcagtctcgctctttccgaatccttgcccagatcactgggactgaacatttgaaagaatctgaagccgataatacaaagaaggcaaataactctcaggagccttctccgcagttggcttccttggtagcttccacacggagcatgcccgagagcctggacagcccaacctctggcagaccaggggttaccagcctcacaactgcagctgccttcaagcctgtaggatccactggcgtcatcaagtcaccaagctggcaacggccaaaccaaggagtaccttccactggaagaatctcaaacagcgctacttactcaggatcagtggcaccagccaactcagctttgggacaaacccagccaagtgaccaggacactttagtgcaaagagctgagcacattccagcagggaaacgaactccgatgtgcgcccattgtaaccaggtcatcagaggaccattcttagtggcactggggaaatcttggcacccagaagaattcaactgcgctcactgcaaaaatacaatggcctacattggatttgtagaggagaaaggagccctgtattgtgagctgtgctatgagaaattctttgcccctgaatgtggtcgatgccaaaggaagatccttggagaagtcatcaatgcgttgaaacaaacttggcatgtttcctgttttgtgtgtgtagcctgtggaaagcccattcggaacaatgtttttcacttggaggatggtgaaccctactgtgagactgattattatgccctctttggtactatatgccatggatgtgaatttcccatagaagctggtgacatgttcctggaagctctgggctacacctggcatgacacttgctttgtatgctcagtgtgttgtgaaagtttggaaggtcagacctttttctccaagaaggacaagcccctgtgtaagaaacatgctcattctgtgaatttttgaaagtcaacagttcaggagaagagaaggaatttgaagagaaaaaggaaaattaaaattactaattaatttttagattcaatatttatatggagttttgaaaaataatagtggccctgaaggaataaattccagctttaaaaaccaagtctgaggaaatatttggcttcataaagtaaagagacggtttggcatttattattactttttcctgtattttatgcccataaaataagctttataaaaaccaatttcctgatggactattaaattcatcttagaataaattagtgaagaatttaattttagaataaataatccaatctgaaataattataccttctttccttgttaggtagttatgagtaaatctgcaaaaggcaatgaaaatgccttaaattttatcaataacagaattattgtatttaaaaaaaaactaatacttatctttaaaatagtaaataggattttaaacagagaattttatcagtaataggtgtcagtttttaaaaaattgcttgtaggctgagcgcggtggctcacgcctgtaatcccagcactttgggaggccaaggtgggtggaccacatgaggtcaggagtttgagatcagcctggccaacatggtgaaaccccatctctactaaaaatacaaaaattagccggacgcagtggcacgcgcctgtaatcccagctactcaagaggctgaggcacgagaatcacttgaacccgggagggagaggttgcagtgagccaagatcgtaccactgcactccagcctgggtgacagagtgagactccgtctccaaaaaaaaactttgcttgtatattatttttgccttacagtggatcattctagtaggaaaggacaataagattttttatcaaaatgtgtcatgccagtaagagatgttatattcttttcttatttcttccccacccaaaaataagctaccatatagcttataagtctcaaatttttgccttttactaaaatgtgattgtttctgttcattgtgtatgcttcatcacctatattaggcaaattccattttttcccttgcgctaaggtaaagatttaattaaataattttggcctctcatagttttctctctctttaaagagaataaatagagggccaggtgtggtggctcacgcctgtgatcccagcactttgggaggccaagacgggcggatcatgaggtcaagagatcaagatcatcctggccaacatggtgaaaccctgtctctactaaaaatacaaaaatgagctgggcatggtggggcgtgcctgtagtcccatgtacttgggaggctgaggcaggaaaattcttgaacccaggagacggaagttgcagtgagctgagatcacaccactgcactccagcctggtgacagagcaagactccggctctt

SEQ ID NO: 52 - protein, 596 aa, human organism
MSNYSVSLVGPAPWGFRLQGGKDFNMPLTISSLKDGGKAAQANVRIGDVVLSIDGINAQGMTHLEAQNKIKGCTGSLNMTLQRASAAPKPEPVPVQKGEPKEVVKPVPITSPAVSKVTSTNNMAYNKAPRPFGSVSSPKVTSIPSPSSAFTPAHATTSSHASPSPVAAVTPPLFAASGLHANANLSADQSPSALSAGKTAVNVPRQPTVTSVCSETSQELAEGQRRGSQGDSKQQNGPPRKHIVERYTEFYHVPTHSDASKKRLIEDTEDWRPRTGTTQSRSFRILAQITGTEHLKESEADNTKKANNSQEPSPQLASLVASTRSMPESLDSPTSGRPGVTSLTTAAAFKPVGSTGVIKSPSWQRPNQGVPSTGRISNSATYSGSVAPANSALGQTQPSDQDTLVQRAEHIPAGKRTPMCAHCNQVIRGPFLVALGKSWHPEEFNCAHCKNTMAYIGFVEEKGALYCELCYEKFFAPECGRCQRKILGEVINALKQTWHVSCFVCVACGKPIRNNVFHLEDGEPYCETDYYALFGTICHGCEFPIEAGDMFLEALGYTWHDTCFVCSVCCESLEGQTFFSKKDKPLCKKHAHSVNF

SEQ ID NO: 53 - DNA, 1115 bp, human organism
atggccaactgtaaaatgaccaaaagcatcaggttccctgccctggagcactgctatactggcggggaggtcgtgttgcccaaggatcaggaggagtggaaaagacggacgggccttctgctctacgagaactatgggcagtcggaaacgggactaatttgtgccacctactggggaatgaagatcaagccgggtttcatggggaaggccactccaccctatgacgtccagtttcatatggaggcctcagttgaaaactgcattattgtgagcatgaacaccgctgaccctggcagccagggcatcacacacagcctcttgctacaggtcattgatgacaagggcagcatcctgccacctaacacagaaggaaacattggcatcagaatcaaacctgtcaggcctgtgagcctcttcatgtgctatgagggtgacccagagaagacagctaaagtggaatgtggggacttctacaacactggggacagaggaaagatggatgaagagggctacatttgtttcctggggaggagtgatgacatcattaatgcctctgggtatcgcatcgggcctgcagaggttgaaagcgctttggtggagcacccagcggtggcggagtcagccgtggtgggcagcccagacccgattcgaggggaggtggtgaaggcctttattgtcctgaccccacagttcctgtcccatgacaaggatcagctgaccaaggaactgcagcagcatgtcaagtcagtgacagccccatacaagtacccaaggaaggtggagtttgtctcagagctgccaaaaaccatcactggcaagattgaacggaaggaacttcggaaaaaggagactggtcagatgtaatcggcagtgaactcagaacgcactgcacacctgaggcaaatccctggccactttagtctccccactatggtgaggacgagggtggggcattgagagtgttgatttgggaaagtatcaggagtgccatgattccaatgttttccttcttttaaattaaattcagttgctctgcttcctccaagtcctctgtatctttagaatttcccaggtgagcactcataacgcaagtaataaaatactgatatcaacaa

SEQ ID NO: 54 - protein, 287 aa, human organism
MANCKMTKSIRFPALEHCYTGGEVVLPKDQEEWKRRTGLLLYENYGQSETGLICATYWGMKIKPGFMGKATPPYDVQFHMEASVENCIIVSMNTADPGSQGITHSLLLQVIDDKGSILPPNTEGNIGIRIKPVRPVSLFMCYEGDPEKTAKVECGDFYNTGDRGKMDEEGYICFLGRSDDIINASGYRIGPAEVESALVEHPAVAESAVVGSPDPIRGEVVKAFIVLTPQFLSHDKDQLTKELQQHVKSVTAPYKYPRKVEFVSELPKTITGKIERKELRKKETGQM

SEQ ID NO: 55 - DNA, 521 bp, human organism
gagagagggaggcagaagaggaagtcagagcgatgtgctgtgaaatctactaccgtttgctggttttgaaaatggagaaaaagagtgaggaactgagaaacatggatggccttgggaacgtggaaaagggtcactgaaatgggacgacatgaactcaaggaggctatttatgaccatgtcatttgcaacatgaagaaagcttatctggagtgaaagtaaatgagaccaacagagataagagacccggagaaatcctggttacactgcttgaatcctgtcagtcctatactggagtcctgttaatacaaaataatagtaataatccctctgtttcttatgtttatgccaacttcaacaaaaagaaacttgactaagagacaatataagaacttaatgtgtaattaagaaagaactctccaccacggggaatgtgaaaggtatatgagtcccttttcacgatgcgatgtcatgtcttttaaataagccatactttatgttcaataaaaagagaataagcagga

SEQ ID NO: 56 - protein, 34 aa, human organism
MCCEIYYRLLVLKMEKKSEELRNMDGLGNVEKGH

SEQ ID NO: 57 - DNA, 2064 bp, human organism
atggacagttgcctgcaacatatgagagacctactttacctccttcaggagctcaggtgtttaaatccagctacactactccctgatccagactccactactcctgttcatgactgtcaggatctgttggaaactaccaaaactggccaacctgatcttcaagatgtgcccctagaaaaggcagatgccactgtgttcacagatggtagcagcttcctcgagcagggagaacgaaaagctgtttcttttccacagccagatctgcctgacaatcccacatactcaacagaagaagaaaaactggcttcagatgttggagcaaataaaaatcaggaaggacgtgtattcgcaaacactacttggagggccggtacctccaaggaagtctcctttgcagttgatttatgtgtactgttcccagagccagctcgtacccatgaagagcaacataatttgccggtcataggagcaggaagtgtcgaccttgcagcaggatttggacactctgggagccaaactggatgtggaagctccaaaggtgcagaaaaagggctccaaaatgttgacttttacctctgtcctggaaatcaccctgacgctagctgtagagatacttaccagtttttctgccctgattggacatgtgtaactttagccacctactctgggggatcaactagatcttcaactctttccataagtcgtgttcctcatcctaaattatgtactagaaaaaattgtaatcctcttactataactgtccatgaccctaatgcagctcaatggtattatggcatgtcatggggattaagactttatatcccaggatttgatgttgggactatgttcaccatccaaaagaaaatcttggtctcatggagctcccccaagccaatcgggcctttaactgatctaggtgaccctatattccagaaacaccctgacaaagttgatttaactgttcctctgccattcttagttcctagaccccagctacaacaacaacatcttcaacccagcctaatgtctatactaggtggagtacaccatctccttaacctcacccagcctaaactagcccaagattgttggctatgtttaaaagcaaaacccccttattatgtaggattaggagtagaagccacacttaaacgtggccctctatcttgtcatacacgaccccgtgctctcacaataggagatgtgtctggaaatgcttcctgtctgattagtaccgggtataacttatctgcttctccttttcaggctacttgtaatcagtccctgcttacttccataagcacctcagtctcttaccaagcacccaacaatacctggttggcctgcacctcaggtctcactcgctgcattaatggaactgaaccaggacctctcctgtgcgtgttagttcatgtacttccccaggtatatgtgtacagtggaccagaaggacgacaactcatcgctccccctgagttacatcccaggttgcaccaagctgtcccacttctggttcccctattggctggtcttagcatagctggatcagcagccattggtacggctgccctggttcaaggagaaactggactaatatccctgtctcaacaggtggatgctgattttagtaacctccagtctgccatagatatactacattcccaggtagagtctctggctgaagtagttcttcaaaactgccgatgcttagatctgctattcctctctcaaggaggtttatgtgcagctctaggagaaagttgttgcttctatgccaatcaatctggagtcataaaaggtacagtaaaaaaagttcgagaaaatctagataggcaccaacaagaacgagaaaataacatcccctggtatcaaagcatgtttaactggaacccatggctaactactttaatcactgggttagctggacctctcctcatcctactattaagtttaatttttgggccttgtatattaaattcgtttcttaattttataaaacaacgcatagcttctgtcaaacttacgtatcttaagactcaatatgacacccttgttaataactga

SEQ ID NO: 58 - protein, 687 aa, human organism
MDSCLQHMRDLLYLLQELRCLNPATLLPDPDSTTPVHDCQDLLETTKTGQPDLQDVPLEKADATVFTDGSSFLEQGERKAVSFPQPDLPDNPTYSTEEEKLASDVGANKNQEGRVFANTTWRAGTSKEVSFAVDLCVLFPEPARTHEEQHNLPVIGAGSVDLAAGFGHSGSQTGCGSSKGAEKGLQNVDFYLCPGNHPDASCRDTYQFFCPDWTCVTLATYSGGSTRSSTLSISRVPHPKLCTRKNCNPLTITVHDPNAAQWYYGMSWGLRLYIPGFDVGTMFTIQKKILVSWSSPKPIGPLTDLGDPIFQKHPDKVDLTVPLPFLVPRPQLQQQHLQPSLMSILGGVHHLLNLTQPKLAQDCWLCLKAKPPYYVGLGVEATLKRGPLSCHTRPRALTIGDVSGNASCLISTGYNLSASPFQATCNQSLLTSISTSVSYQAPNNTWLACTSGLTRCINGTEPGPLLCVLVHVLPQVYVYSGPEGRQLIAPPELHPRLHQAVPLLVPLLAGLSIAGSAAIGTAALVQGETGLISLSQQVDADFSNLQSAIDILHSQVESLAEVVLQNCRCLDLLFLSQGGLCAALGESCCFYANQSGVIKGTVKKVRENLDRHQQERENNIPWYQSMFNWNPWLTTLITGLAGPLLILLLSLIFGPCILNSFLNFIKQRIASVKLTYLKTQYDTLVNN

SEQ ID NO: 59 - DNA, 2960 bp, human organism
tgatggtggaaatttcttgaaaccgctctcgtaatttgccacgtgctgttgcaaatattctggtgaatgaacacagaatcagcatggctttcctttgctgagaaatcactgatgggaagtgagacttgttaaacttgaaagtgaatggacctgagtggaccctttgatcacatcagtaaacatgagcggtaccaaacctgatattttatgggcaccacaccatgttgatagatttgttgtgtgtgactcagaactaagtctttatcatgtggaatctactgtgaattcagaactcaaagctggatctttacgtttatctgaagactctgcagctacattactgtcaataaattcagatacaccctatatgaaatgtgttgcctggtatcttaattatgatcctgaatgtctgctggcagttggacaagcaaatggtcgagttgtacttacaagccttggtcaagatcataactcaaagttcaaagatttgataggaaaagagtttgttccaaaacatgcacgacaatgtaatacccttgcctggaatccactggatagtaactggctagctgctggtttagataagcacagagctgacttttcagtgctaatatgggatatctgcagcaaatatactcctgatatagttcccatggaaaaagtgaaactttcagcaggtgaaactgaaacaacattattagtaacaaaaccactttatgagttaggacagaatgatgcttgtctgtctctttgttggcttccacgagaccagaaacttctccttgctggtatgcatcgtaacctagctatatttgatcttcggaatacaagccaaaagatgttcgtaaatacaaaagctgttcagggtgtgacggtagacccatatttccacgatcgtgttgcttccttctatgaaggtcaggttgcaatatgggatcttagaaaatttgagaagccagttttgacattgactgagcaaccaaaacccttaacaaaagtagcatggtgtcccactaggactggtctacttgccactttaacaagggatagtaatattattagattgtatgatatgcagcatacacccactcccattggggatgaaactgaacccacaataattgaaagaagtgtgcaaccttgtgacaattacattgcttcctttgcgtggcatccaacaagtcaaaatcgaatgatagttgtaactcccaaccgaacaatgtcagacttcactgtttttgaaaggatatctcttgcctggagcccaattacatctttaatgtgggcttgtggtcgtcatttatatgaatgtacggaagaagaaaatgataattctttagaaaaagatatagcaacgaagatgcgtcttcgggctttatcaaggtatggacttgatacagagcaggtgtggaggaaccacattttagctggaaatgaagatccacagctcaagtcactctggtatactctgcactttatgaagcaatacacagaagatatggatcagaaatctccaggcaacaaaggatcattggtttatgcaggaattaaatcaattgtaaagtcatcgttgggaatggtggaaagcagcagacataattggagtgggttggataagcaaagtgatattcaaaacttaaatgaagagagaatcttagctttacagctttgtgggtggataaagaaaggaacggatgtagacgtggggccatttttgaactcccttgtacaagaaggggaatgggaaagagctgctgctgtggcattgttcaacttggatattcgccgagcaatccaaatcctgaatgaaggggcatcttctgaaaaaggcaggagatctgaatctcaatgtggtagcaatggctttatcgggttatacggatgagaagaactccctttggagagaaatgtgtagcacactgcgattacagctaaataacccgtatttgtgtgtcatgtttgcatttctgacaagtgaaacaggatcttacgatggagttttgtatgaaaacaaagttgcagtacgtgacagagtggcatttgcttgtaaattccttagtgatactcagatacatcgaaaagttgaccaatgaaatgaaagaggctggaaatttggaaggaattttgcttacaggccttactaaagatggagtggacttaatggagagttatgttgatagaactggagatgttcaaacagcaagttactgtatgttacagggttcacctttagatgttcttaaagatgaaagggttcagtactggattgagaattatagaaatttattagatgcctggaggttttggcataaacgagctgaatttgatattcacaggagtaagttggatcccagttccaagcctttagcacaagtttttgtgagttgcaatttctgtggcaagtcaatctcctacagctgttcagctgtgcctcatcagggcagaggttttagtcagtatggtgtgagtggctcaccaacgaaatctaaagtcacaagttgtcctggctgtcgaaaaccacttcctcgatgtgcgctttgtctcattaatatgggaacaccagtttctagctgtcctggaggaaccaaatcagatgaaaaagtggacttgagcaaggacaaaaaattagcccaatttaacaactggtttacatggtgtcataattgcaggcacggtggacatgctggacatatgcttagttggttcagggaccatgcagagtgccctgtgtctgcatgcacgtgtaaatgtatgcagttggatacaacggggaatctggtacctgcagagactgtccagccataaaatgttaccaccttaagagaacccttcaagtgtggagctttctagtaggtgtccttcatagctcagaaacatacctcagaacaagccattcatgacttacctgtaatgggaaaataaatcattctatcagaaaaaaaaaaaaaaaaaaaaaaaaa

SEQ ID NO: 60 - protein, 567 aa, human organism
MSGTKPDILWAPHHVDRFVVCDSELSLYHVESTVNSELKAGSLRLSEDSAATLLSINSDTPYMKCVAWYLNYDPECLLAVGQANGRVVLTSLGQDHNSKFKDLIGKEFVPKHARQCNTLAWNPLDSNWLAAGLDKHRADFSVLIWDICSKYTPDIVPMEKVKLSAGETETTLLVTKPLYELGQNDACLSLCWLPRDQKLLLAGMHRNLAIFDLRNTSQKMFVNTKAVQGVTVDPYFHDRVASFYEGQVAIWDLRKFEKPVLTLTEQPKPLTKVAWCPTRTGLLATLTRDSNIIRLYDMQHTPTPIGDETEPTIIERSVQPCDNYIASFAWHPTSQNRMIVVTPNRTMSDFTVFERISLAWSPITSLMWACGRHLYECTEEENDNSLEKDIATKMRLRALSRYGLDTEQVWRNHILAGNEDPQLKSLWYTLHFMKQYTEDMDQKSPGNKGSLVYAGIKSIVKSSLGMVESSRHNWSGLDKQSDIQNLNEERILALQLCGWIKKGTDVDVGPFLNSLVQEGEWERAAAVALFNLDIRRAIQILNEGASSEKGRRSESQCGSNGFIGLYG

SEQ ID NO: 61 - DNA, 856 bp, human organism
  misc_feature (37)..(37): n is a, c, g, or t
  misc_feature (757)..(757): n is a, c, g, or t
  misc_feature (769)..(769): n is a, c, g, or t
ttgtacatcttaacaaccttaagctgtacaaatagancaataatatctaaatggtgtgatgatcagcccacagtacacatcattgatgagaatttcactggtctcaacctttctcatgctgagtcctggctttgtaaaatgacttataaaggtccaaggatttagagatgattaagagataagctggcattctgtaaaggcaccatcgtctatcccctgtcttatctagataaagaatgtagtgctaaatcttgtaataatattgtacaaatggaaattcaatcttaaggattattttttccatattgttgtatttcattgtggtgtattggaaagtgatctggactttgagtgagaagatgtgatttggaccatggcacttaaaaactctataacctcaggcaagtcttttaatcttctctgagcctcagttttcctcatttttcaaatatagagagtataacatttatctcataagacaagttgtagtaaattactgttttacaaatgtaagataacttttaactgtgagattccatattccagtcttacattattatgtttatctgccacagggagaagtcctcagataaaaatgtctaccaaaagactgacacgtggagttaatcatttgacagatgcaaatgcttccacccccaacaaatatactttctttaacttctgtgtgggtatcacttagggaaaaaaaggcaggcaacaaaatattttttaattctatcttaggaaaaattgtagncaaatctttttntcccattaacaaataatgtaagccttaatattcaaggggtaataaaaatacaaagtcttccaaacaggtaacttacttgaaaacttt

SEQ ID NO: 62 - protein, 348 aa, human organism
  misc_feature (152)..(152): Xaa can be any naturally occurring amino acid
  misc_feature (154)..(154): Xaa can be any naturally occurring amino acid
  misc_feature (217)..(217): Xaa can be any naturally occurring amino acid
MGARGAPSRRRQAGRRLRYLPTGSFPFLLLLLLLCIQLGGGQKKKENLLAEKVEQLMEWSSRRSIFRMNGDKFRKFIKAPPRNYSMIVMFTALQPQRQCSVCRQANEEYQILANSWRYSSAFCNKLFFSMVDYDEGTDVFQQLNMNSAPTFXHXPPKGRPKRADTFDLQRIGFAAEQLAKWIADRTDVHIRVFRPPNYSGTIALALLVSLVGGLLYXRRNNLEFIYNKTGWAMVSLCIVFAMTSGQMWNHIRGPPYAHKNPHNGQVSYIHGSSQAQFVAESHIILVLNAAITMGMVLLNEAATSKGDVGKRRIICLVGLGLVVFFFSFLLSIFRSKYHGYPYSDLDFE

SEQ ID NO: 63 - DNA, 1130 bp, human organism
ggtcgccgcaccggccgcctccggcccgccgccgcccccagcgccgccgccgccaccgccggggcgcccaccgcgctgccagcctaccccgcggccgagccgcccgggccgctgtggctgcagggcgagccgctgcatttctgctgcctagacttcagcctggaggagctgcagggcgagccgggctggcggctgaaccgtaagcccattgagtccacgctggtggcctgcttcatgaccctggtcatcgtggtgtggagcgtggccgccctcatctggccggtgcccatcatcgccggcttcctgcccaacggcatggaacagcgccggaccaccgccagcaccaccgcagccacccccgccgcagtgcccgcagggaccaccgcagccgccgccgccgccgccgctgccgccgccgccgcggccgtcacttcgggggtggcgaccaagtgacccgctccgctcctccctgtgtccgtcctgtgtccgcgcgcgcgggtgcctttcccgccggggactcggccggtgtgcttcgtgctgtagttatcgttagttcctcttcccgagatggggccgccgagagaccccagcgcctttgaaaagcaaggtttgtgctgcgcttccagttccgaaaagcagatgtttaagcccttggactgagggtgggatcgcagctccgaagacggagaggagggaaatggggccctttcccctctattgcatccccctgcccgactccttccccgcacccacgtgccctagattcatggcagaaaatgaccaaatcctgtgtatttgttttatatatttaataactgttttaaatgaaagttttagtaaaaaaaatacaaaacaaaaagattaaattgctattgctgtagtaagagaagctctttgtatctgaacatagttgtatttgaaatttgtggttttttaatttatttaaaattggggggagggcatgggaaggatttaacaccgatatattgttaccgctgaaaatgaactttatgaaccttttccaagttgatctatccagtgacgtggcctggtgggcgtttcttcttgtacttatgtggttttttggcttttaatacagacattttcctccaaaaaaaaaaaaaaaaagg

SEQ ID NO: 64 - protein, 150 aa, human organism
GRRTGRLRPAAAPSAAAATAGAPTALPAYPAAEPPGPLWLQGEPLHFCCLDFSLEELQGEPGWRLNRKPIESTLVACFMTLVIVVWSVAALIWPVPIIAGFLPNGMEQRRTTASTTAATPAAVPAGTTAAAAAAAAAAAAAAVTSGVATK

SEQ ID NO: 65 - DNA, 1521 bp, human organism
  misc_feature (798)..(798): n is a, c, g, or t
cggccgcggcccgggtccctcgcaaagccgctgccatcccggagggcccagccagcgggctcccggaggctggccgggcaggcgtggtgcgcggtaggagctgggcgcgcacggctaccgcgcgtggaggagacactgccctgccgcgatgggggcccggggcgctccttcacgccgtaggcaagcggggcggcggctgcggtacctgcccaccgggagctttcccttccttctcctgctgctgctgctctgcatccagctcgggggaggacagaagaaaaaggagaatcttttagctgaaaaagtagagcagctgatggaatggagttccagacgctcaatcttccgaatgaatggtgataaattccgaaaatttataaaggcaccacctcgaaactattccatgattgttatgttcactgctcttcagcctcagcggcagtgttctgtgtgcaggcaagctaatgaagaatatcaaatactggcgaactcctggcgctattcatctgctttttgtaacaagctcttcttcagtatggtggactatgatgaggggacagacgtttttcagcagctcaacatgaactctgctcctacattcaygcatttwcctccaaaaggcagacctaagagagctgatacttttgacctccaaagaattggatttgcagctgagcaactagcaaagtggattgctgacagaacggatgttcatattcgggttttcagaccacccaactactctggtaccattgctttggccctgttagtgtcgcttgttggaggtttgctttattngagaaggaacaacttggagttcatctataacaagactggttgggccatggtgtctctgtgtatagtctttgctatgacttctggccagatgtggaaccatatccgtggacctccatatgctcataagaacccacacaatggacaagtgagctacattcatgggagcagccaggctcagtttgtggcagaatcacacattattctggtactgaatgccgctatcaccatggggatggttcttctaaatgaagcagcaacttcgaaaggcgatgttggaaaaagacggataatttgcctagtgggattgggcctggtggtcttcttcttcagttttctactttcaatatttcgttccaagtaccacggctatccttatagtgatctggactttgagtgagaagatgtgatttggaccatggcacttaaaaactctataacctcagctttttaattaaatgaagccaagtgggatttgcataaagtgaatgtttaccatgaagataaactgttcctgactttatactattttgaattcattcatttcattgtgatcagctagcttattcttgtgtactttttttaaactgtgggttttcctagtaaatttaatttacagaaatcaatggtagcatttagtaatctacaaaggaaatatcaaagtgtttttcaagcctgttatatycagtgtgtkccacaggattgcaataaatgacaatgtaatta

SEQ ID NO: 66 - protein, 348 aa, human organism; identical to SEQ ID NO: 62
  misc_feature (152)..(152): Xaa can be any naturally occurring amino acid
  misc_feature (154)..(154): Xaa can be any naturally occurring amino acid
  misc_feature (217)..(217): Xaa can be any naturally occurring amino acid

SEQ ID NO: 67 - DNA, 2306 bp, human organism
ggtttcatatgaactctcccgccacccgggaacagctggctgccaccgtttgtgttttccgagtttgtattcttgcaggtgaccaagatggagttttctggaagaaagcggaggaagctgaggttggcaggtgaccagaggaatgcttcctaccctcattgccttcagttttacttgcagccaccttctgaaaacatatctttaacagaatttgaaaacttggctattgatagagttaaattgttaaaatcagttgaaaatcttggagtgagctatgtgaaaggaactgaacaataccagagtaagttggagagtgagcttcggaagctcaagttttcctacagagagaagctagaagatgaatatgaaccacgaagaagagatcatatttctcattttattttgcggcttgcttattgccagtctgaagaacttagacgctggttcattcaacaagaaatggatctccttcgatttagatttagtattttacccaaggataaaattcaggatttcttaaaggatagccaattgcagtttgaggctataagtgatgaagagaagactcttcgagaacaggagattgttgcctcatcaccaagtttaagtggacttaagttggggttcgagtccatttataagatcccttttgctgatgctctggatttgtttcgaggaaggaaagtctatttggaagatggctttgcttacgtaccacttaaggacattgtggcaatcatcctgaatgaatttagagccaaactgtccaaggctttggcattaacagccaggtccttgcctgctgtgcagtctgatgaaagacttcagcctctgctcaatcacctcagtcattcctacactggccaagattacagtacccagggaaatgttgggaagatttctttagatcagattgatttgctttctaccaaatccttcccaccttgcatgcgtcagttacataaagccttgcgggaaaatcaccatcttcgtcatggaggccgaatgcagtatggcctatttctgaagggcattggtttaactttggaacaggcattgcagttctggaagcaagaatttatcaaaggaaagatggatccagacaagtttgataaaggttactcttacaacatccgtcacagctttggaaaggaaggcaagaggacagactatacacctttcagttgcctgaagattattctgtccaatccaccaagccaaggggattatcatgggtgcccattccgtcacagtgatccagagctgctgaagcaaaagttgcagtcatacaagatctctcctggagggataagccagattttggatttagtaaaggggacacattaccaggtagcctgtcaaaaatactttgagatgatacacaatgtggatgattgtggcttttctttgaatcatcctaatcagttcttttgtgagagccaacgtattctaaatggtggtaaagacataaagaaggaacctatccaaccagaaactcctcaacccaaaccaagtgtccagaaaaccaaggatgcatcatctgctctggcctctttaaattcctctctggaaatggatatggaaggactagaagattactttagtgaagattcttaggcagttttataaccctttttcctcaatagcctgtttcctgtttttaagattttgcctttgttgttgaaaaagggtttcactgtcaccaaggcttagtgcagtgacacaattacagctgattgcagccttgaccttcccagctcaagtgatcctcctacctcagcctcccaagtagttaggacacacaggtgtgcacctcatatccagataatttttttcaatttttttttgtagaggtggggggtctccctatgttgcccaggcagatctcagactcctgggctcaagcgatcctcacacctcagcgtcccagagtgctgggattacagttgtgagccactgtgcctggcctttttttttttttaaccttttcgtttaacttctctcttcactgcatcccaatccatctacaggcatgcacacttattaggaaaggaggtttgaggtaacaacagagactttcactatattttgctttgacagaaggaaagaggaggagtttctattaaaatctgtcacttgagtgatgtcatttaagtcctattttaggagataaaaacagctttggggactggttaaagtcccccagaaactacaataaagaacaacttttgttttaactcttaatcactttgtaattttgactcaatccttttctggaccatttttgttaataaatatcaaagtgt

SEQ ID NO: 68 - protein, 509 aa, human organism [sequence omitted]

SEQ ID NO: 69 - DNA, 1901 bp, human organism
aattcatacaggagagaagtcatatatatgcagtgattgtggaaaaggcttcatcaagaagtctcggctcattaatcatcagagagttcatacaggagagaaaccacatggatgcagcctgtgtgggaaggccttctccaaaaggtccaggctcactgaacaccagagaactcatacaggagagaagccctatgaatgcactgaatgtgacaaagcattccgctggaaatcacagctcaatgcacatcagaaagctcacacaggagagaagtcatatatatgccgtgattgtggaaaaggcttcattcagaagggaaatctcattgtacatcagcgaattcatactggagaaaaaccctatatatgcaatgaatgtggaaaaggcttcatccaaaagggcaacctccttattcatcgacgtactcacactggagagaaaccctatgaatgcaatgaatgtgggaaaggcttcagccagaagacatgtttaatatcccatcagagatttcacacaggaaagacaccctttgtatgtactgagtgtggaaaatcctgctcacacaagtcaggtctcattaaccaccagagaattcacacaggagagaaaccctatacatgcagtgactgtgggaaagctttcagagataaatcatgtctcaacagacatcggagaactcatacaggggagagaccgtatggatgctctgattgtgggaaagctttctcccacttgtcatgccttgtttatcataagggaatgctgcatgcaagagagaaatgtgtaggttcagtcaaattggaaaatccttgctcagagagtcatagcttatcacatacacgtgatctcatacaggataaagactctgttaacatggtgactctgcagatgccttctgtggcagctcagacctcattaactaacagtgcgttccaagcagagagcaaagtagccattgtgagccagcctgttgccagaagttcagtctcagcagatagtagaatttgcacagaataaaaaccatatgaatgcagtgaatgtggtagtgctttcagtgatcaattacatcatatgtcacaaaaaacacagaggaacaaactgatatattcaaggtggaaagcccttgaataaaaccttatggctaataagcatatactcagagaaaaatagtatgaagtggagactgggaaattcttttatgggaagatagatcttctcatcagtgaccatagatcacatcttcagtgagcttatagttggtagaaatataatgatcatggaaaagtccttgttcagaaacagtacgccagtaggtatcagggggtttacacaggagagaaacttttggaagacctttgaaggctatgaatgtggcagggttgctagtggtacattctgccttatcctcagagggaatcatatagaaataaaactatgaaaatgtaactagaacatcttcatcaaaatatgaaagaacacacgaagcaaataagccctgtgaaaaggagtattttagagatttcgatcagaaatctaacatcattatatggcagataatatacaggatgtgtattttaggacaatataccttgaatcactagttgatatgtcaatgactaattaaaaggggttgtcagtgttacacatcattggttaaatttatagcacaatgtacctcttcccccttttttgataagagtcttctattcccaaccaagatcattatatgattagctcttgtgtttctttgattccaaatttcttcacttgttatttcagactactgaagctcttcaaaaggaaaaatgtatttaatttaataatgtaacacaacaagtttggatgtgtttaactttataaataatcaccccagaggaatgaagttcaaaacttgtgaataacc

SEQ ID NO: 70 - protein, 127 aa, human organism
MDAACVGRPSPKGPGSLNTRELIQERSPMNALNVTKHSAGNHSSMHIRKLTQERSHIYAVIVEKASFRREISLYISEFILEKNPIYAMNVEKASSKRATSLFIDVLTLERNPMNAMNVGKASARRHV

SEQ ID NO: 71 - DNA, 1005 bp, human organism
aatttcggcacgggggggaggcacagtgagtccactggggcacggcagcgtctaagccacaagccgactgacataagccaggtcctaacggagcctatgtgtaagtccactactggtgcaaggttgcacacttctaagaagagcggcgtggggggctcggcgaccttcgcttcagtcgctcccccgtgcagtcccctgtgcccaagacacagcctgatgcttgtgctccggtgggcggacttggaggcggcgggaactgcaattggtggctttgaagggcggcgagcgggaacagctcttgaggagtgagactgcaggagatgtgggccgtgccaaagagatggatgagactgttgctgagttcatcaagaggaccatcttgaaaatccccatgaatgaactgacaacaatcctgaaggcctgggattttttgtctgaaaatcaactgcagactgtaaatttccgacagagaaaggaatctgtagttcagcacttgatccatctgtgtgaggaaaagcgtgcaagtatcagtgatgctgccctgttagacatcatttatatgcaatttcatcagcaccagaaagtttgggatgtttttcagatgagtaaaggaccaggtgaagatgttgacctttttgatatgaaacaatttaaaaattcgttcaagaaaattcttcagagagcattaaaaaatgtgacagtcagcttcagagaaactgaggagaatgcagtctggattcgaattgcctggggaacacagtacacaaagccaaaccagtacaaacctacctacgtggtgtactactcccagactccgtacgccttcacgtcctcctccatgctgaggcgcaatacaccgcttctgggtcaggagttagaagctactgggaaaatctacctccgacaagaggagatcattttagatattaccgaaatgaagaaagcttgcaattagtgaacatgaaaggaaaataaaaattcctcacagtcaaaaaaaaaaaaaaa

SEQ ID NO: 72 - protein, 204 aa, human organism
MDETVAEFIKRTILKIPMNELTTILKAWDFLSENQLQTVNFRQRKESVVQHLIHLCEEKRASISDAALLDIIYMQFHQHQKVWDVFQMSKGPGEDVDLFDMKQFKNSFKKILQRALKNVTVSFRETEENAVWIRIAWGTQYTKPNQYKPTYVVYYSQTPYAFTSSSMLRRNTPLLGQELEATGKIYLRQEEIILDITEMKKACN

SEQ ID NO: 73 - DNA, 1125 bp, human organism
atggtgctgtgggagtccccgcggcagtgcagcagctggacactttgcgagggcttttgctggctgctgctgctgcccgtcatgctactcatcgtagcccgcccggtgaagctcgctgctttccctacctccttaagtgactgccaaacgcccaccggctggaattgctctggttatgatgacagagaaaatgatctcttcctctgtgacaccaacacctgtaaatttgatggggaatgtttaagaattggagacactgtgacttgcgtctgtcagttcaagtgcaacaatgactatgtgcctgtgtgtggctccaatggggagagctaccagaatgagtgttacctgcgacaggctgcatgcaaacagcagagtgagatacttgtggtgtcagaaggatcatgtgccacagatgcaggatcaggatctggagatggagtccatgaaggctctggagaaactagtcaaaaggagacatccacctgtgatatttgccagtttggtgcagaatgtgacgaagatgccgaggatgtctggtgtgtgtgtaatattgactgttctcaaaccaacttcaatcccctctgcgcttctgatgggaaatcttatgataatgcatgccaaatcaaagaagcatcgtgtcagaaacaggagaaaattgaagtcatgtctttgggtcgatgtcaagataacacaactacaactactaagtctgaagatgggcattatgcaagaacagattatgcagagaatgctaacaaattagaagaaagtgccagagaacaccacataccttgtccggaacattacaatggcttctgcatgcatgggaagtgtgagcattctatcaatatgcaggagccatcttgcaggtgtgatgctggttatactggacaacactgtgaaaaaaaggactacagtgttctatacgttgttcccggtcctgtacgatttcagtatgtcttaatcgcagctgtgattggaacaattcagattgctgtcatctgtgtggtggtcctctgcatcacaaggaaatgccccagaagcaacagaattcacagacagaagcaaaatacagggcactacagttcagacaatacaacaagagcgtccacgaggttaatctga

SEQ ID NO: 74 - protein, 374 aa, human organism
MVLWESPRQCSSWTLCEGFCWLLLLPVMLLIVARPVKLAAFPTSLSDCQTPTGWNCSGYDDRENDLFLCDTNTCKFDGECLRIGDTVTCVCQFKCNNDYVPVCGSNGESYQNECYLRQAACKQQSEILVVSEGSCATDAGSGSGDGVHEGSGETSQKETSTCDICQFGAECDEDAEDVWCVCNIDCSQTNFNPLCASDGKSYDNACQIKEASCQKQEKIEVMSLGRCQDNTTTTTKSEDGHYARTDYAENANKLEESAREHHIPCPEHYNGFCMHGKCEHSINMQEPSCRCDAGYTGQHCEKKDYSVLYVVPGPVRFQYVLIAAVIGTIQIAVICVVVLCITRKCPRSNRIHRQKQNTGHYSSDNTTRASTRLI

SEQ ID NO: 75 - DNA, 2068 bp, human organism
  misc_feature (143)..(143): n is a, c, g, or t
ggcgccgggattgggagggcttcttgcaggctgctgggctggggctaagggctgctcagtttccttcagcggggcactgggaagcgccatggcactgcagggcatctcggtcgtggagctgtccggcctggccccgggccgtntctgtgctatggtcctggctgacttcggggcgcgtgtggtacgcgtggaccggcccggctcccgctacgacgtgagccgcttgggccggggcaagcgctcgctagtgctggacctgaagcagccgcgggagccgcgtgctgcggcgtctgtgcaagcggtcggatgtgctgctggagcccttccgccgcggtgtcatggagaaactccagctgggcccagagattctgcagcgggaaaatccaaggcttatttatgccaggctgagtggatttggccagttcaggaaagcttctgccggttagctggccacgatatcaactatttggctttgtcaggtgttctctcaaaaattggcagaagtggtgagaatccgtatgccccgctgaatctcgtggctgactttgctggtggtggccttatgtgtgcactgggcattataatggctctttttgaccgcacacgcactgacaagggtcaggtcattgatgcaaatatggtggaaggaacagcatatttaagttcttttctgtggaaaactcagaaatcgagtctgtgggaagcacctcgaggacagaacatgttggatggtggagcacctttctatacgacttacaggacagcagatggggaattcatggctgttggagcaatagaaccccagttctacgagctgctgatcaaaggacttggactaaagtctgatgaacttcccaatcagatgagcacggatgattggccagaaatgaagaagaagtttgcagatgtatttgcaaagaagacgaaggcagagtggtgtcaaatctttgacggcacagatgcctgtgtgactccggttctgacttttgaggaggttgttcatcatgatcacaacaaggaacggggctcgtttatcaccagtgaggagcaggacgtgagcccccgccttgcacctctgctgttaaacaccccagccatcccttcttccaaaggggatcctttcataggagaacacactgaggagatacttgaagaatttggattcagccgagaagagatttatcagcttaactcagataaaatcattgaaagtaataaggtaaaagctagtctctaacttccaggcccacggctcaagtgaatttgaatactgcatttacagtgtagagtaacacataacattgtatgcatggaaacatggaggaacagtattacagtgtcctaccactctaatcaagaaaagaattacagactctgattctacagtgatgattgaattctaaaaatggttatcattagggcttttgatttataaaactttgggtacttatactaaattatggtagttattctgccttccagtttgcttgatatatttgttgatattaagattcttgacttatattttgaatgggttctagtgaaaaaggaatgatatattcttgaagacatcgatatacatttatttacactcttgattctacaatgtagaaaatgaggaaatgccacaaattgtatggtgataaaagtcacgtgaaacagagtgattggttgcatccaggccttttgtcttggtgttcatgatctccctctaagcacattccaaactttagcaacagttatcacactttgtaatttgcaaagaaaagtttcacctgtattgaatcagaatgccttcaactgaaaaaaacatatccaaaataatgaggaaatgtgttggctcactacgtagagtccagagggacagtcagttttagggttgcctgtatccagtaactcggggcctgtttccccgtgggtctctgggctgtcagctttcctttctccatgtgtttgatttctcctcaggctggtagcaagttctggatcttatacccaacacacagcaacatccagaaataaagatctcaggaccccccaaaaaaaaaaaaaaaaaaaaaaaaaaaaa

SEQ ID NO: 76 - protein, 382 aa, human organism
  misc_feature (19)..(19): Xaa can be any naturally occurring amino acid
MALQGISVVELSGLAPGRXCAMVLADFGARVVRVDRPGSRYDVSRLGRGKRSLVLDLKQPREPRAAASVQAVGCAAGALPPRCHGETPAGPRDSAAGKSKAYLCQAEWIWPVQESFCRLAGHDINYLALSGVLSKIGRSGENPYAPLNLVADFAGGGLMCALGIIMALFDRTRTDKGQVIDANMVEGTAYLSSFLWKTQKSSLWEAPRGQNMLDGGAPFYTTYRTADGEFMAVGAIEPQFYELLIKGLGLKSDELPNQMSTDDWPEMKKKFADVFAKKTKAEWCQIFDGTDACVTPVLTFEEVVHHDHNKERGSFITSEEQDVSPRLAPLLLNTPAIPSSKGDPFIGEHTEEILEEFGFSREEIYQLNSDKIIESNKVKASL

SEQ ID NO: 77 - DNA, 5685 bp, human organism
gttaaatccttactttaccagattcttgatggtatccattacctccatgcaaattgggtgcttcacagagacttgaaaccagcaaatatcctagtaatgggagaaggtcctgagagggggagagtcaaaatagctgacatgggttttgccagattattcaattctcctctaaagccactagcagatttggatccagtagttgtgacattttggtatcgggctccagaacttttgcttggtgcaaggcattatacaaaggccattgatatatgggcaataggttgtatatttgctgaattgttgacttcggaacctatttttcactgtcgtcaggaagatataaaaacaagcaatccctttcatcatgatcaactggatcggatatttagtgtcatggggtttcctgcagataaagactgggaagatattagaaagatgccagaatatcccacacttcaaaaagactttagaagaacaacgtatgccaacagtagcctcataaagtacatggagaaacacaaggtcaagcctgacagcaaagtgttcctcttgcttcagaaactcctgaccatggatccaaccaagagaattacctcggagcaagctctgcaggatccctattttcaggaggaccctttgccaacattagatgtatttgccggctgccagattccataccccaaacgagaattccttaatgaagatgatcctgaagaaaaaggtgacaagaatcagcaacagcagcagaaccagcatcagcagcccacagcccctccacagcaggcagcagcccctccacaggcgcccccaccacagcagaacagcacccagaccaacgggaccgcaggtggggctggggccggggtcgggggcaccggagcagggttgcagcacagccaggactccagcctgaaccaggtgcctccaaacaagaagccacggctagggccttcaggcgcaaactcaggtggacctgtgatgccctcggattatcagcactccagttctcgcctgaattaccaaagcagcgttcagggatcctctcagtcccagagcacacttggctactcttcctcgtctcagcagagctcacagtaccacccatctcaccaggcccaccggtactgaccagctcccgttgggccaggccagcccagcccagagcacaggctccagcaatatgtctgcattgaaaagaaccaaaaaaatgcaaactatgatgccatttaaaactcatacacatgggaggaaaaccttatatactgagcattgtgcaggactgatagctcttctttattgacttaaagaagattcttgtgaagtttccccagcaccccttccctgcatgtgttccattgtgacttctctgataaagcgtctgatctaatcccagcacttctgtaaccttcagcatttctttgaaggatttcctggtgcacctttctcatgctgtagcaatcactatggtttatcttttcaaagctcttttaataggattttaatgttttagaaacaggattccagtggtgtatagttttatacttcatgaactgatttagcaacacaggtaaaaatgcaccttttaaagcactacgttttcacagacaataactgttctgctcatggaagtcttaaacagaaactgttactgtcccaaagtactttactattacgttcgtatttatctagtttcagggaaggtctaataaaaagacaagcggtgggacagagggaacctacaaccaaaaactgcctagatctttgcagttatgtgctttatgccacgaagaactgaagtatgtggtaatttttatagaatcattcatatggaactgagttcccagcatcatcttattctgaatagcattcagtaattaagaattacaattttaaccttcatgtagctaagtctaccttaaaaagggtttcaagagctttgtacagtctcgatggcccacaccaaaacgctgaagagagtaacaactgcactaggatttctgtaaggagtaattttgatcaaaagacgtgttacttccctttgaaggaaaagtttttagtgtgtattgtacataaagtcggcttctctaaagaaccattggtttcttcacatctgggtctgcgtgagtaactttcttgcataatcaaggttactcaagtagaagcctgaaaattaatctgcttttaaaataaagagcagtgttctccattcgtatttgtattagatatagagtgactatttttaaagcatgttaaaaatttaggttttattcatgtttaaagtatgtattatgtatgcataattttgctgttgttactgaaacttaattctatcaagaatctttttcattgcactgaatgatttcttttgcccctaggagaaaacttaataattgtgcctaaaaactatgggcggatagtataagactatactagacaaagtgaatatttgcatttccattatctatgaattagtggctgagttctttcttagctgctttaaggagcccctcactccccagagtcaaaaggaaatgtaaaaacttagagctcccattgtaatgtaaggggcaagaaatttgtgttcttctgaatgctactagcagcaccagccttgttttaaatgttttcttgagctagaagaaatagctgattattgtatatgcaaattacatgcatttttaaaaactattctttctgaacttatctacctggttatgatactgtgggtccatacacaagtaaaataagattagacagaagccagtatacattttgcactattgatgtgatactgtagccagccaggaccttactgatctcagcataataatgctcactaataatgaagtctgcatagtgacactcatcaagactgaagatgaagcaggttacgtgctccattggaaggagtttctgatagtctcctgctgttttaccccttccattttttaaaataagaaattagcagccctctgcataatgtagctgcctatatgcagttttatcctgtgccctaaagcctcactgtccagagctgttggtcatcagatgcttattgcaccctcaccatgtgcctggtgccctgctgggtagagaacacagaggacagggcatacttcttgtccttaaggagcttgtgatctgtgacagtaagccctcctgggatgtctgtgccatgtgattgacttacaagtgaaactgtcttataatatgaaggtctttttgtttacttctaaacccacttgggtagttactatccccaaatctgttctgtaaataatattatggaagggtttctatgtcagtctaccttagagaaagccagtgattcaatatcacaaaaggcattgacgtatctttgaaatgttcacagcagccttttaacaacaactgggtggtccttgtaggcagaacatactctcctaagtggttgtaggaaattgcaaggaaaatagaaggtctgttcttgctctcaaggaggttacctttaataaaagaagacaaacccagatagatatgtaaaccaaaatactatgccccttaatactttataagcagcattgttaaatagttcttacgcttatacattcacagaactaccctgttttccttgtatataatgacttttgctggcagaactgaaatataaactgtaaggggatttcgtcagttgctcccagtatacaatatcctccaggacatagccagaaatctccattccacacatgactgagttcctatccctgcactggtactggctcttttctcctctttccttgcctcagggttcgtgctacccactgattccctttacccttagtaataattttggatcattttctttcctttaaaggggaacaaagccttttttttttttgagacggagtgttgctctgtcacccaagctggagtgcagtggcacgatcttggctcactccaacctccaccttccaggttcaagtgattctcctgcctcagcctcccgagtagctgggactacgggcacgcaccaccacgtctggctaatttttgtatttttagtagagatggggtttcaccctattggtcaggctggtcttgaattcctcacctcaggtcatccgcctgtctcggcctcccgaagtgctgggattataggtgtgagccaccgcacccagttgggaacaaagcctttttaacacacgtaagggccctcaaaccgtgggacctctaaggagacctttgaagctttttgagggcaaactttacctttgtggtccccaaatgatggcatttctctttgaaatttattagatactgttatgtcccccaagggtacaggaggggcatccctcagcctatgggaacacccaaactaggaggggttattgacaggaaggaatgaatccaagtgaaggctttctgctcttcgtgttacaaaccagtttcagagttagctttctggggaggtgtgtgtttgtgaaaggaattcaagtgttgcaggacagatgagctcaaggtaaggtagctttggcagcagggctgatactatgaggctgaaacaatccttgtgatgaagtagatcatgcagtgacatacaaagaccaaggattatgtatatttttatatctctgtggttttgaaactttagtacttagaattttggccttctgcactactcttttgctcttacgaacataatggactcttaagaatggaaagggatgacatttacctatgtgtgctgcctcattcctggtgaagcaactgctacttgttctctatgcctctaaaatgatgctgttttctctgctaaaggtaaaagaaaagaaaaaaatagttggaaaataagacatgcaacttgatgtgcttttgagtaaatttatgcagcagaaactatacaatgaaggaagaattctatggaaattacaaatccaaaactctatgatgatgtcttcctagggagtagagaaaggcagtgaaatggcagttagaccaacagaggcttgaaggattcaagtacaagtaatattttgtataaaacatagcagtttaggtccccataatcctcaaaaatagtcacaaatataacaaagttcattgttttagggtttttaaaaaacgtgttgtacctaaggccatacttactcttctatgctatcactgcaaaggggtgatatgtatgtattatataaaaaaaaaaacccttaatgcactgttatctcctaaatatttagtaaattaatactatttaatttttttaaagatttgtctgtgtagacactaaaagtattacacaaaatctggactgaaggtgtcctttttaacaacaatttaaagtactttttatatatgttatgtagtatatcctttctaaactgcctagtttgtatattcctataattcctatttgtgaagtgtacctgttcttgtctcttttttcagtcattttctgcacgcatccccctttatatggttatagagatgactgtagcttttcgtgctccactgcgaggtttgtgctcagagccgctgcaccccagcgaggcctgctccatggagtgcaggacgagctactgctttggagcgagggtttcctgcttttgagttgacctgacttccttcttgaaatgactgttaaaactaaaataaattacattgcatttattttatattcttggttgaaataaaatttaattgactttg

SEQ ID NO: 78 - protein, 375 aa, human organism
VKSLLYQILDGIHYLHANWVLHRDLKPANILVMGEGPERGRVKIADMGFARLFNSPLKPLADLDPVVVTFWYRAPELLLGARHYTKAIDIWAIGCIFAELLTSEPIFHCRQEDIKTSNPFHHDQLDRIFSVMGFPADKDWEDIRKMPEYPTLQKDFRRTTYANSSLIKYMEKHKVKPDSKVFLLLQKLLTMDPTKRITSEQALQDPYFQEDPLPTLDVFAGCQIPYPKREFLNEDDPEEKGDKNQQQQQNQHQQPTAPPQQAAAPPQAPPPQQNSTQTNGTAGGAGAGVGGTGAGLQHSQDSSLNQVPPNKKPRLGPSGANSGGPVMPSDYQHSSSRLNYQSSVQGSSQSQSTLGYSSSSQQSSQYHPSHQAHRY

SEQ ID NO: 79 - DNA, 2190 bp, human organism
atgaatcctttccagaaaaatgagtccaaggaaactcttttttcacctgtctccattgaagaggtaccacctcgaccacctagccctccaaagaagccatctccgacaatctgtggctccaactatccactgagcattgccttcattgtggtgaatgaattctgcgagcgcttttcctattatggaatgaaagctgtgctgatcctgtatttcctgtatttcctgcactggaatgaagatacctccacatctatataccatgccttcagcagcctctgttattttactcccatcctgggagcagccattgctgactcgtggttgggaaaattcaagacaatcatctatctctccttggtgtatgtgcttggccatgtgatcaagtccttgggtgccttaccaatactgggaggacaagtggtacacacagtcctatcattgatcggcctgagtctaatagctttggggacaggaggcatcaaaccctgtgtggcagcttttggtggagaccagtttgaagaaaaacatgcagaggaacggactagatacttctcagtcttctacctgtccatcaatgcagggagcttgatttctacatttatcacacccatgctgagaggagatgtgcaatgttttggagaagactgctatgcattggcttttggagttccaggactgctcatggtaattgcacttgttgtgtttgcaatgggaagcaaaatatacaataaaccaccccctgaaggaaacatagtggctcaagttttcaaatgtatctggtttgctatttccaatcgtttcaagaaccgttctggagacattccaaagcgacagcactggctagactgggcagctgagaaatatccaaagcagctcattatggatgtaaaggcactgaccagggtactattcctttatatcccattgcccatgttctgggctcttttggatcagcagggttcacgatggactttgcaagccatcaggatgaataggaatttggggttttttgtgcttcagccggaccagatgcaggttctaaatccctttctggttcttatcttcatcccgttgtttgactttgtcatttatcgtctggtctccaagtgtggaattaacttctcatcacttaggaaaatggctgttggtatgatcctagcgtgcctggcatttgcagttgcggcagctgtagagataaaaataaatgaaatggccccagcccagtcaggtccccaggaggttttcctacaagtcttgaatctggcagatgatgaggtgaaggtgacagtggtgggaaatgaaaacaattctctgttgatagagtccatcaaatcctttcagaaaacaccacactattccaaactgcacctgaaaacaaaaagccaggattttcacttccacctgaaatatcacaatttgtctctctacactgagcattctgtgcaggagaagaactggtacagtcttgtcattcgtgaagatgggaacagtatctccagcatgatggtaaaggatacagaaagcaaaacaaccaatgggatgacaaccgtgaggtttgttaacactttgcataaagatgtcaacatctccctgagtacagatacctctctcaatgttggtgaagactatggtgtgtctgcttatagaactgtgcaaagaggagaataccctgcagtgcactgtagaacagaagataagaacttttctctgaatttgggtcttctagactttggtgcagcatatctgtttgttattactaataacaccaatcagggtcttcaggcctggaagattgaagacattccagccaacaaaatgtccattgcgtggcagctaccacaatatgccctggttacagctggggaggtcatgttctctgtcacaggtcttgagttttcttattctcaggctccctctagcatgaaatctgtgctccaggcagcttggctattgacaattgcagttgggaatatcatcgtgcttgttgtggcacagttcagtggcctggtacagtgggccgaattcattttgttttcctgcctcctgctggtgatctgcctgatcttctccatcatgggctactactatgttcctgtaaagacagaggatatgcggggtccagcagataagcacattcctcacatccaggggaacatgatcaaactagagaccaagaagacaaaactctga

SEQ ID NO: 80 - protein, 729 aa, human organism [sequence omitted]

SEQ ID NO: 81 - DNA, 1221 bp, human organism
atggacggatcccacagcgcagccctgaagctgcagcagctgcctcccacaagtagctccagcgccgtaagcgaggcctccttctcctacaaggaaaacctgattggcgccctcttggcgatcttcgggcacctcgtggtcagcattgcacttaacctccagaagtactgccacatccgcctggcaggctccaaggatccccgggcctatttcaagaccaagacatggtggctgggcctgttcctgatgcttctgggcgagctgggtgtgttcgcctcctacgccttcgcgccgctgtcactcatcgtgcccctcagcgcagtttctgtgatagctagtgccatcataggaatcatattcatcaaggaaaagtggaaaccgaaagactttctgaggcgctacgtcttgtcctttgttggctgcggtttggctgtcgtgggtacctacctgctggtgacattcgcacccaacagtcacgagaagatgacaggcgagaatgtcaccaggcacctcgtgagctggcctttccttttgtacatgctggtggagatcattctgttctgcttgctgctctacttctacaaggagaagaacgccaacaacattgtcgtgattcttctcttggtggcgttacttggctccatgacagtggtgacagtcaaggccgtggctgggatgcttgtcttgtccattcaagggaacctgcagcttgactaccccatcttctacgtgatgttcgtgtgcatggtggcaaccgccgtctatcaggctgcgtttttgagtcaagcctcacagatgtacgactcctctttgattgccagtgtgggctacattctgtccacaaccattgctatcacagcaggtgcaatattttacctggacttcatcggggaggacgtgctgcacatctgcatgtttgcactggggtgcctcattgcattcttgggcgtcttcttaatcacgcgtaacaggaagaagcccattccatttgagccctatatttccatggatgccatgccaggtatgcagaacatgcacgataaagggatgactgtccagcctgaacttaaagcttctttttcctatggggctctggaaaacaatgacaacatttctgagatctacgctcctgccaccctgccagtcatgcaagaagagcacggctccagaagtgcctctggggtcccctaccgagtcctagagcacaccaagaaggaatga

SEQ ID NO: 82 - protein, 406 aa, human organism
MDGSHSAALKLQQLPPTSSSSAVSEASFSYKENLIGALLAIFGHLVVSIALNLQKYCHIRLAGSKDPRAYFKTKTWWLGLFLMLLGELGVFASYAFAPLSLIVPLSAVSVIASAIIGIIFIKEKWKPKDFLRRYVLSFVGCGLAVVGTYLLVTFAPNSHEKMTGENVTRHLVSWPFLLYMLVEIILFCLLLYFYKEKNANNIVVILLLVALLGSMTVVTVKAVAGMLVLSIQGNLQLDYPIFYVMFVCMVATAVYQAAFLSQASQMYDSSLIASVGYILSTTIAITAGAIFYLDFIGEDVLHICMFALGCLIAFLGVFLITRNRKKPIPFEPYISMDAMPGMQNMHDKGMTVQPELKASFSYGALENNDNISEIYAPATLPVMQEEHGSRSASGVPYRVLEHTKKE

SEQ ID NO: 83 - DNA, 1316 bp, human organism
cactcattaagaacagaggaggctgcctgttactcctggtgttgcatccctccagacactctgctgtttcctgcctaggcgtggctgcagccatggctaggaaagcgctgccacccacccacctgggccagagctggttctgctcctgctgcagggacactgagctggctatctcggcgcttcgggcaagaactgcaacaggctctcctgggtcctgcaggtgtacagccgggcccctgccttgtgcctcagctctcgagagctgctgctgccgggtgacctgatccaacctgataaggtgccatcttcagctaccactgcaaggccctgagggcaacagcagcacggcactgcccacccggctgctgatggcctggtgccagctgggagtcctcccggcacttcgaggccactgagccacccttccagccccagcccaccatggacaggggtatccagcttcctcctcaacctcgtcctctgcccctgagccagtgacgcccaaggacatgcctgttacccaggtcctgtaccagcactagctggtcaagggcatgacagtgctggaggccgtcttggagatccaggccatcactggcagcaggctgctctccatggtgccagggcccgccaggccaccaggctcatgctgggacccaacccagtgcacaaggacttggctgctgagccacacacccaggagaaggtggataagtgggctaccaagggcttcctgcaggctaggggaggagccacccccgcttccctattgtgaccaggcctatggggaggagctgtccatacgccaccgtgagacctgggcctggctctcaaggacagacaccgcctggcctggtgctccaggggtgaagcaggccagaatcctgggggagctgctcctggtttgagctgcattcaggaagtgcgggacatggtaggggaggcaaaaagccttgggcactaccctccctgtggagctgttcggtgtccgtcgagctagccacaccctgacaccatgttcaagggtaccggaagagaagggtgtctgcccccaacctcccctgtgggtgtcactggccagatgtcatgagggaagcaggccttgtgagtggacactgaccatgagtccctggggggagtgatcccccaggcatcgtgtgccatgttgcacttctgcccaggcagcagggtgggtgggtaccatgggtgcccacccctccaccacatggggccccaaagcactgcaggccaagcagggcaaccccacacccttgacataaaagcatcttgaagcttttaaaaaaaaaaaaaaaaaa

SEQ ID NO: 84 - protein, 117 aa, human organism
MTVLEAVLEIQAITGSRLLSMVPGPARPPGSCWDPTQCTRTWLLSHTPRRRWISGLPRASCRLGEEPPPLPYCDQAYGEELSIRHRETWAWLSRTDTAWPGAPGVKQARILGELLLV

SEQ ID NO: 85 - DNA, 3442 bp, human organism
agccggtgcgccgcagactagggcgcctcgggccagggagcgcggaggagccatggccaccgctaacggggccgtggaaaacgggcagccggacgggaagccgccggccctgccgcgccccatccgcaacctggaggtcaagttcaccaagatatttatcaacaatgaatggcacgaatccaagagtgggaaaaagtttgctacatgtaacccttcaactcgggagcaaatatgtgaagtggaagaaggagataagcccgacgtggacaaggctgtggaggctgcacaggttgccttccagaggggctcgccatggcgccggctggatgccctgagtcgtgggcggctgctgcaccagctggctgacctggtggagagggaccgcgccaccttggccgccctggagacgatggatacagggaagccatttcttcatgcttttttcatcgacctggagggctgtattagaaccctcagatactttgcagggtgggcagacaaaatccagggcaagaccatccccacagatgacaacgtcgtatgcttcaccaggcatgagcccattggtgtctgtggggccatcactccatggaacttccccctgctgatgctggtgtggaagctggcacccgccctctgctgtgggaacaccatggtcctgaagcctgcggagcagacacctctcaccgccctttatctcggctctctgatcaaagaggccgggttccctccaggagtggtgaacattgtgccaggattcgggcccacagtgggagcagcaatttcttctcaccctcagatcaacaagatcgccttcaccggctccacagaggttggaaaactggttaaagaagctgcgtcccggagcaatctgaagcgggtgacgctggagctgggggggaagaacccctgcatcgtgtgtgcggacgctgacttggacttggcagtggagtgtgcccatcagggagtgttcttcaaccaaggccagtgttgcacggcagcctccagggtgttcgtggaggagcaggtctactctgagtttgtcaggcggagcgtggagtatgccaagaaacggcccgtgggagaccccttcgatgtcaaaacagaacaggggcctcagattgatcaaaagcagttcgacaaaatcttagagctgatcgagagtgggaagaaggaaggggccaagctggaatgcgggggctcagccatggaagacaaggggctcttcatcaaacccactgtcttctcagaagtcacagacaacatgcggattgccaaagaggagattttcgggccagtgcaaccaatactgaagttcaaaagtatcgaagaagtgataaaaagagcgaatagcaccgactatggactcacagcagccgtgttcacaaaaaatctcgacaaagccctgaagttggcttctgccttagagtctggaacggtctggatcaactgctacaacgccctctatgcacaggctccatttggtggctttaaaatgtcaggaaatggcagagaactaggtgaatacgctttggccgaatacacagaagtgaaaactgtcaccatcaaacttggcgacaagaacccctgaaggaaaggcggggctccttcctcaaacatcggacggcggaatgtggcagatgaaatgtgctggaggaaaaaaatgacatttctgaccttcccgggacacattcttctggaggctttacatctactggagttgaatgattgctgttttcctctcactctcctgtttattcaccagactggggatgcctataggttgtctgtgaaatcgcagtcctgcctggggagggagctgttggccatttctgtgtttccctttaaaccagatcctggagacagtgagatactcagggcgttgttaacagggagtggtatttgaagtgtccagcagttgcttgaaatgctttgccgaatctgactccagtaagaatgtgggaaaaccccctgtgtgttctgcaagcagggctcttgcaccagcggtctcctcagggtggacctgcttacagagcaagccacgcctctttccgaggtgaaggtgggaccattccttgggaaaggattcacagtaaggttttttggtttttgttttttgttttcttgtttttaaaaaaaggatttcacagtgagaaagttttggttagtgcataccgtggaagggcgccagggtctttgtggattgcatgttgacattgaccgtgagattcggcttcaaaccaatactgcctttggaatatgacagaatcaatagcccagagagcttagtcaaagacgatatcacggtctaccttaaccaaggcactttcttaagcagaaaatattgttgaggttacctttgctgctaaagatccaatcttctaacgccacaacagcatagcaaatcctaggataattcacctcctcatttgacaaatcagagctgtaattcactttaacaaattacgcatttctatcacgttcactaacagcttatgataagtctgtgtagtcttccttttctccagttctgttacccaatttagattagtaaagcgtacacaactggaaagactgctgtaataacacagccttgttatttttaagtcctattttgatattaatttctgattagttagtaaataacacctggattctatggaggacctcggtcttcatccaagtggcctgagtatttcactggcaggttgtgaatttttcttttcctctttgggaatccaaatgatgatgtgcaatttcatgttttaacttgggaaactgaaagtgttcccatatagcttcaaaaacaaaaacaaatgtgttatccgacggatacttttatggttactaactagtactttcctaattgggaaagtagtgcttaagtttgcaaattaagttggggagggcaataataaaatgagggcccgtaacagaaccagtgtgtgtataacgaaaaccatgtataaaatgggcctatcacccttgtcagagatataaattaccacatttggcttcccttcatcagctaacacttatcacttatactaccaataacttgttaaatcaggatttggcttcatacactgaattttcagtattttatctcaagtagatatagacactaaccttgatagtgatacgttagagggttcctattcttccattgtacgataatgtctttaatatgaaatgctacattatttataattggtagagttattgtatctttttatagttgtaagtacacagaggtggtatatttaaacttctgtaatatactgtatttagaaatggaaatatatatagtgttaggtttcacttcttttaaggtttacccctgtggtgtggtttaaaaatctataggcctgggaattccgatcctagctgcagatcgcatcccacaatgcgagaatgataaaataaaattggatatttgaga

SEQ ID NO: 86 - protein, 512 aa, human organism
MATANGAVENGQPDGKPPALPRPIRNLEVKFTKIFINNEWHESKSGKKFATCNPSTREQICEVEEGDKPDVDKAVEAAQVAFQRGSPWRRLDALSRGRLLHQLADLVERDRATLAALETMDTGKPFLHAFFIDLEGCIRTLRYFAGWADKIQGKTIPTDDNVVCFTRHEPIGVCGAITPWNFPLLMLVWKLAPALCCGNTMVLKPAEQTPLTALYLGSLIKEAGFPPGVVNIVPGFGPTVGAAISSHPQINKIAFTGSTEVGKLVKEAASRSNLKRVTLELGGKNPCIVCADADLDLAVECAHQGVFFNQGQCCTAASRVFVEEQVYSEFVRRSVEYAKKRPVGDPFDVKTEQGPQIDQKQFDKILELIESGKKEGAKLECGGSAMEDKGLFIKPTVFSEVTDNMRIAKEEIFGPVQPILKFKSIEEVIKRANSTDYGLTAAVFTKNLDKALKLASALESGTVWINCYNALYAQAPFGGFKMSGNGRELGEYALAEYTEVKTVTIKLGDKNP

SEQ ID NO: 87 - DNA, 2252 bp, human organism
gaccattagcaggcacccaggcctgtctttggctcggaaacggtggcccccaatgtagcctagtttgaacctaggaactgcaggaccagagagattccactggagcctgatggacgggtgacagagggaaccctactctggaaactgtcagtcccagggcactggggagggctgaggccgaccatgcccagcctgctgctgctgttcacggctgctctgctgtccagctgggctcagcttctgacagacgccaactcctggtggtcattagctttgaacccggtgcagagacccgagatgtttatcatcggtgcccagcccgtgtgcagtcagcttcccgggctctcccctggccagaggaagctgtgccaattgtaccaggagcacatggcctacataggggagggagccaagactggcatcaaggaatgccagcaccagttccggcagcggcggtggaattgcagcacagcggacaacgcatctgtctttgggagagtcatgcagataggcagccgagagaccgccttcacccacgcggtgagcgccgcgggcgtggtcaacgccatcagccgggcctgccgcgagggcgagctctccacctgcggctgcagccggacggcgcggcccaaggacctgccccgggactggctgtggggcggctgtggggacaacgtggagtacggctaccgcttcgccaaggagtttgtggatgcccgggagcgagagaagaactttgccaaaggatcagaggagcagggccgggtgctcatgaacctgcaaaacaacgaggccggtcgcagggctgtgtataagatggcagacgtagcctgcaaatgccacggcgtctcggggtcctgcagcctcaagacctgctggctgcagctggccgagttccgcaaggtcggggaccggctgaaggagaagtacgacagcgcggccgccatgcgcgtcacccgcaagggccggctggagctggtcaacagccgcttcacccagcccaccccggaggacctggtctatgtggaccccagccccgactactgcctgcgcaacgagagcacgggctccctgggcacgcagggccgcctctgcaacaagacctcggagggcatggatggctgtgagctcatgtgctgcgggcgtggctacaaccagttcaagagcgtgcaggtggagcgctgccactgcaagttccactggtgctgcttcgtcaggtgtaagaagtgcacggagatcgtggaccagtacatctgtaaatagcccggagggcctgctcccggccccccctgcactctgcctcacaaaggtctatattatataaatctatataaatctattttatatttgtataagtaaatgggtgggtgctatacaatggaaagatgaaaatggaaaggaagagcttatttaagagacgctggagatctctgaggagtggactttgctggttctctcctcttggtgggtgggagacagggctttttctctccctctggcgaggactctcaggatgtagggacttggaaatatttactgtctgtccaccacggcctggaggagggaggttgtggttggatggaggagatgatcttgtctggaagtctagagtctttgttggttagaggactgcctgtgatcctggccactaggccaagaggccctatgaaggtggcgggaactcagcttcaacctcgatgtcttcagggtcttgtccagaatgtagatgggttccgtaagaggcctggtgctctcttactctttcatccacgtgcacttgtgcggcatctgcagtttacaggaacggctccttccctaaaatgagaagtccaaggtcatctctggcccagtgaccacagagagatctgcacctcccggacttcaggcctgcctttccagcgagaattcttcatcctccacggttcactagctcctacctgaagaggaaagggggccatttgacctgacatgtcaggaaagccctaaactgaatgtttgcgcctgggctgcagaagccagggtgcatgaccaggctgcgtggacgttatactgtcttcccccacccccggggaggggaagcttgagctgctgctgtcactcctccaccgagggaggcctcacaaaccacaggacgctgcaacgggtcaggctggcgggcccggcgtgctcatcatctctgccccaggtgtacggtttctctctgacattaaatgcccttcatggaaaaaaaaaaaagaaaaaaaaaaaaaaaa

SEQ ID NO: 88 - protein, 359 aa, human organism
MPSLLLLFTAALLSSWAQLLTDANSWWSLALNPVQRPEMFIIGAQPVCSQLPGLSPGQRKLCQLYQEHMAYIGEGAKTGIKECQHQFRQRRWNCSTADNASVFGRVMQIGSRETAFTHAVSAAGVVNAISRACREGELSTCGCSRTARPKDLPRDWLWGGCGDNVEYGYRFAKEFVDAREREKNFAKGSEEQGRVLMNLQNNEAGRRAVYKMADVACKCHGVSGSCSLKTCWLQLAEFRKVGDRLKEKYDSAAAMRVTRKGRLELVNSRFTQPTPEDLVYVDPSPDYCLRNESTGSLGTQGRLCNKTSEGMDGCELMCCGRGYNQFKSVQVERCHCKFHWCCFVRCKKCTEIVDQYICK

SEQ ID NO: 89 - DNA, 794 bp, human organism
ggcagccgtctgtgccacccagagccggcgggccgctaggtccccggagaccctgctatggtgcgtgcgggcgccgtgggggctcatctccccgcgtccggcttggatatcttcggggacctgaagaagatgaacaagcgccagctctattaccaggttttaaacttcgccatgatcgtgtcttctgcactcatgatatggaaaggcttgatcgtgctcacaggcagtgagagccccatcgtggtggtgctgagtggcagtatggagccggcctttcacagaggagacctcctgttcctcacaaatttccgggaagacccaatcagagctggtgaaatagttgtttttaaagttgaaggacgagacattccaatagttcacagagtaatcaaagttcatgaaaaagataatggagacatcaaatttctgactaaaggagataataatgaagttgatgatagaggcttgtacaaagaaggccagaactggctggaaaagaaggacgtggtgggaagagcaagagggtttttaccatatgttggtatggtcaccataataatgaatgactatccaaaattcaagtatgctcttttggctgtaatgggtgcatatgtgttactaaaacgtgaatcctaaaatgagaagcagttcctgggaccagattgaaatgaattctgttgaaaaagagaaaaactaatatatttgagatgttccattttctgtataaaagggaacagtgtggagatgtttttgtcttgtccaaataaaagattcaccagtaaaaaaaaaaaaaa

SEQ ID NO: 90 - protein, 192 aa, human organism
MVRAGAVGAHLPASGLDIFGDLKKMNKRQLYYQVLNFAMIVSSALMIWKGLIVLTGSESPIVVVLSGSMEPAFHRGDLLFLTNFREDPIRAGEIVVFKVEGRDIPIVHRVIKVHEKDNGDIKFLTKGDNNEVDDRGLYKEGQNWLEKKDVVGRARGFLPYVGMVTIIMNDYPKFKYALLAVMGAYVLLKRES

SEQ ID NO: 91 - DNA, 2108 bp, human organism
gattactcacacagtcttgaagatgcaatgtcagctatttaggacagaaacatccaaggccgtgtcagaactcaattacgactacatatgcattaaggcaggaactggcaggcctcagggtacgccaactataggactcgtgcttctcgtacgctgggctataatctatgaaactgagctccagagccagccaatcacttagctcctcataacaagtctaactggctctggaaagctgaaagggctgcactggaacaacacagatgagatattctacacattaatctacttatctggaatcactttgcctctaaaggccagagaaaaatcacagcttccttgtcggaggggaaaaggacaggtgatctggggaaaacgcagctacacctggagcaaggtctcttcccggcttggcaatctcagctgtgccggcgctacgggacccgagccgtcccagaaaccaaagggcaggcacggcagcaaacgcctgagtgctgctgccttcggtgactatatgagaatggaaacttctaaggaagccaggttgttagaattgttaccccctttactcagagataacatagattatccaggctgagatggaaaacaagccctttattgaattttcaacacagactccctgcttctcatctccttaataaaatttcattaaaatccccttgaactcccatgttcaaatctccatttgttgacagacaaagccaacaatactctaaactgaggcctgcaagtcatttcatttgtatttttgtccagaaatttcccataggaagacttcacctcctacaactccgaagaaaacccttactgtccaagaccgtcaccagcaaccatccgcagtcattcaagtggaagctttcacagcttttgtacattctctgtgtcaatatacaactgagttacagactgtcccctggctccctgacccttacaaacactaaaagttttgtttgactcaacttcaagctgctcatctgttagtaagtgatgttcactccagaacacattcatgatgagaactttctaaaagaccagcactgctcttcccctcctataatcataataatcatgataacctgaaacatgttactgggactcgacatttttctggggattgaaatctttagtccttggagctgtcacatagcaggggcaacctcacactgaaacaaaggaagtgatgtcccattattatccaccctgagccaccataatatgctgtttacatttattttcttcagcctgtgcaaaacaaagcaatggaaaaggaaactaaaaaatatacatactagtaccattatcttcttttgcctaaaattactaatgcaccacgtcagtctgcttccttcaggcatcattctcaattcatcaggacttgtattagcaggttctggctagagagactatctcctgtcatcacgatcaattaatgttttctggtgatcacatcaggccctatctaagaagctcatggtatacaagggtcacccaaatagctgagtgcagtccttgctcatatttccttcatcttaaccccgcaaacaagaattaagatgatcccaataaaagaaaaattgctcaggaaactgaacctttttctgaaccaagcactgtcagcaaatctcaggtattagagcaactatggttgattgaaaagtgtctcaaaatctgggccaagaatgattgctaggtccataagctaatttgtctggccttgccatttacgtaagccaaagaaagtcactcatgagtaaactatagaaaacgttcagacccatcctgttagtatgtcaaatcaactaagactggcagggtattaactccattccaggtgacatggataaagagccccattattttcacagtgccagcctctacctaaggaaaccctagaccttggaaccagtttcctggtagggaactgctgacagtttcaatgctgacagttggagccaatgcctcatagtgtaaactgaaagaaaaatagttgctttttaaaatgtcagcaagaaggcctgcctcatcttaacaaagcaaaaaaaaatgctttaattcaaattaaaaatcatgatactaaaaaaaaaaaa

SEQ ID NO: 92 - protein, 59 aa, human organism
MQCQLFRTETSKAVSELNYDYICIKAGTGRPQGTPTIGLVLLVRWAIIYETELQSQPIT

SEQ ID NO: 93 - DNA, 1991 bp, human organism
cgcggcggctggcgtcgggaaagtacagtaaaaagtccgagtgcagccgccgggcgcaggatgggatccggctcctccagctaccggcccaaggccatctacctggacatcgatggacgcattcagaaggtaatcttcagcaagtactgcaactccagcgacatcatggacctgttctgcatcgccaccggcctgcctcggaacacgaccatctccctgctgaccaccgacgacgccatggtctccatcgaccccaccatgcccgcgaattcagaacgcactccgtacaaagtgagacctgtggccatcaagcaactctccgctggtgtcgaggacaagagaaccacaagccgtggccagtctgctgagagaccactgagggacagacgggttgtgggcctggagcagccccggagggaaggagcatttgaaagtggacaggtagagcccaggcccagagagccccagggctgctaccaggaaggccagcgcatccctccagagagagaagaattaatccagagcgtgctggcgcaggttgcagagcagttctcaagagcattcaaaatcaatgaactgaaagctgaagttgcaaatcacttggctgtcctagagaaacgcgtggaattggaaggactaaaagtggtggagattgagaaatgcaagagtgacattaagaagatgagggaggagctggcggccagaagcagcaggaccaactgcccctgtaagtacagttttttggataaccacaagaagttgactcctcgacgcgatgttcccacttaccccaagtacctgctctctccagagaccatcgaggccctgcggaagccgacctttgacgtctggctttgggagcccaatgagatgctgagctgcctggagcacatgtaccacgacctcgggctggtcagggacttcagcatcaaccctgtcaccctcaggaggtggctgttctgtgtccacgacaactacagaaacaaccccttccacaacttccggcactgcttctgcgtggcccagatgatgtacagcatggtctggctctgcagtctccaggagaagttctcacaaacggatatcctgatcctaatgacagcggccatctgccacgatctggaccatcccggctacaacaacacgtaccagatcaatgcccgcacagagctggcggtccgctacaatgacatctcaccgctggagaaccaccactgcgccgtggccttccagatcctcgccgagcctgagtgcaacatcttctccaacatcccacctgatgggttcaagcagatccgacagggaatgatcacattaatcttggccactgacatggcaagacatgcagaaattatggattctttcaaagagaaaatggagaattttgactacagcaacgaggagcacatgaccctgctgaagatgattttgataaaatgctgtgatatctctaacgaggtccgtccaatggaagtcgcagagccttgggtggactgtttattagaggaatattttatgcagagcgaccgtgagaagtcagaaggccttcctgtggcaccgttcatggaccgagacaaagtgaccaaggccacagcccagattgggttcatcaagtttgtcctgatcccaatgtttgaaacagtgaccaagctcttccccatggttgaggagatcatgctgcagccactttgggaatcccgagatcgctacgaggagctgaagcggatagatgacgccatgaaagagttacagaagaagactgacagcttgacgtctggggccaccgagaagtccagagagagaagcagagatgtgaaaaacagtgaaggagactgtgcctgaggaaagcggggggcgtggctgcagttctggacgggctggccgagctgcgcgggatccttgtgcagggaagagctgccctgggcacctggcaccacaagaccatgttttctaagaaccattttgttcactgatacaaaaaaaaaaaaaaa

SEQ ID NO: 94 - protein, 593 aa, human organism
MGSGSSSYRPKAIYLDIDGRIQKVIFSKYCNSSDIMDLFCIATGLPRNTTISLLTTDDAMVSIDPTMPANSERTPYKVRPVAIKQLSAGVEDKRTTSRGQSAERPLRDRRVVGLEQPRREGAFESGQVEPRPREPQGCYQEGQRIPPEREELIQSVLAQVAEQFSRAFKINELKAEVANHLAVLEKRVELEGLKVVEIEKCKSDIKKMREELAARSSRTNCPCKYSFLDNHKKLTPRRDVPTYPKYLLSPETIEALRKPTFDVWLWEPNEMLSCLEHMYHDLGLVRDFSINPVTLRRWLFCVHDNYRNNPFHNFRHCFCVAQMMYSMVWLCSLQEKFSQTDILILMTAAICHDLDHPGYNNTYQINARTELAVRYNDISPLENHHCAVAFQILAEPECNIFSNIPPDGFKQIRQGMITLILATDMARHAEIMDSFKEKMENFDYSNEEHMTLLKMILIKCCDISNEVRPMEVAEPWVDCLLEEYFMQSDREKSEGLPVAPFMDRDKVTKATAQIGFIKFVLIPMFETVTKLFPMVEEIMLQPLWESRDRYEELKRIDDAMKELQKKTDSLTSGATEKSRERSRDVKNSEGDCA

SEQ ID NO: 95 - DNA, 691 bp, human organism
cagtcacaggcgagagccytgggatgcaccggccagaggcatgctgctgctgctcacgcttgccctcctggggggccccacctgggcagggaagatgtatggccctggaggaggcaagtatttcagcaccactgaagactacgaccatgaaatcacagggctgcgggtgtctgtaggtcttctcctggtgaaaagtgtccaggtgaaacttggagactcctgggacgtgaaactgggagccttaggtgggaatacccaggaagtcaccctgcagccaggcgaatacatcacaaaagtctttgtcgccttccaagctttcctccggggtatggtcatgtacaccagcaaggaccgctatttctattttgggaagcttgatggccagatctcctctgcctaccccagccaagaggggcaggtgctggtgggcatctatggccagtatcaactccttggcatcaagagcattggctttgaatggaattatccactagaggagccgaccactgagccaccagttaatctcacatactcagcaaactcacccgtgggtcgctagggtggggtatggggccatccgagctgaggccatctgtgtggtggtggctgatggtactggagtaactgagtcgggacgctgaatctgaatccaccaataaataaagcttctgcagaatcagtgaaaaaaaaa

SEQ ID NO: 96 - protein, 172 aa, human organism
MLLLLTLALLGGPTWAGKMYGPGGGKYFSTTEDYDHEITGLRVSVGLLLVKSVQVKLGDSWDVKLGALGGNTQEVTLQPGEYITKVFVAFQAFLRGMVMYTSKDRYFYFGKLDGQISSAYPSQEGQVLVGIYGQYQLLGIKSIGFEWNYPLEEPTTEPPVNLTYSANSPVGR

SEQ ID NO: 97 - DNA, 1059 bp, human organism
ccgttccgcgctctggcggctcctcccgggcgatgcctccgctctgggccctgctggccctcggctgcctgcggttcggctcggctgtgaacctgcagccccaactggccagtgtgactttcgccaccaacaaccccacacttaccactgtggccttggaaaagcctctctgcatgtttgacagcaaagaggccctcactggcacccacgaggtctacctgtatgtcctggtcgactcagccatttccaggaatgcctcagtgcaagacagcaccaacaccccactgggctcaacgttcctacaaacagagggtgggaggacaggtccctacaaagctgtggcctttgacctgatcccctgcagtgacctgcccagcctggatgccattggggatgtgtccaaggcctcacagatcctgaatgcctacctggtcagggtgggtgccaacgggacctgcctgtgggatcccaacttccagggcctctgtaacgcacccctgtcggcagccacggagtacaggttcaagtatgtcctggtcaatatgtccacgggcttggtagaggaccagaccctgtggtcggaccccatccgcaccaaccagctcaccccatactcgacgatcgacacgtggccaggccggcggagcggaggcatgatcgtcatcacttccatcctgggctccctgcccttctttctacttgtgggttttgctggcgccattgccctcagcctcgtggacatggggagttctgatggggaaacgactcacgactcccaaatcactcaggaggctgttcccaagtcgctgggggcctcggagtcttcctacacgtccgtgaaccgggggccgccactggacagggctgaggtgtattccagcaagctccaagactgagcccagcaccacccctgggcagcagcatcctcctctctggccttgccccaggccctgcagcggtggttgtcacaccctgacttcagggaaggtgaaacagggcttgtccctccaactgcaggaaaacccttaataaaatcttctgatgagttctaaaaaaaaa

SEQ ID NO: 98 - protein, 287 aa, human organism
MPPLWALLALGCLRFGSAVNLQPQLASVTFATNNPTLTTVALEKPLCMFDSKEALTGTHEVYLYVLVDSAISRNASVQDSTNTPLGSTFLQTEGGRTGPYKAVAFDLIPCSDLPSLDAIGDVSKASQILNAYLVRVGANGTCLWDPNFQGLCNAPLSAATEYRFKYVLVNMSTGLVEDQTLWSDPIRTNQLTPYSTIDTWPGRRSGGMIVITSILGSLPFFLLVGFAGAIALSLVDMGSSDGETTHDSQITQEAVPKSLGASESSYTSVNRGPPLDRAEVYSSKLQD

SEQ ID NO: 99 - DNA, 1894 bp, human organism
gtctgacttcctcccagcacattcctgcactctgccgtgtccacactgccccacagacccagtcctccaagcctgctgccagctccctgcaagcccctcaggttgggccttgccacggtgccagcaggcagccctgggctgggggtaggggactccctacaggcacgcagccctgagacctcagagggccaccccttgagggtggccaggcccccagtggccaacctgagtgctgcctctgccaccagccctgctggcccctggttccgctggccccccagatgcctggctgagacacgccagtggcctcagctgcccacacctcttcccggcccctgaagttggcactgcagcagacagctccctgggcaccaggcagctaacagacacagccgccagcccaaacagcagcggcatgggcagcgccagcccgggtctgagcagcgtatcccccagccacctcctgctgccccccgacacggtgtcgcggacaggcttggagaaggcggcagcgggggcagtgggtctcgagagacgggactggagtcccagtccacccgccacgcccgagcagggcctgtccgccttctacctctcctactttgacatgctgtaccctgaggacagcagctgggcagccaaggcccctggggccagcagtcgggaggagccacctgaggagcctgagcagtgcccggtcattgacagccaagccccagcgggcagcctggacttggtgcccggcgggctgaccttggaggagcactcgctggagcaggtgcagtccatggtggtgggcgaagtgctcaaggacatcgagacggcctgcaagctgctcaacatcaccgcagatcccatggactggagccccagcaatgtgcagaagtggctcctgtggacagagcaccaataccggctgccccccatgggcaaggccttccaggagctggcgggcaaggagctgtgcgccatgtcggaggagcagttccgccagcgctcgcccctgggtggggatgtgctgcacgcccacctggacatctggaagtcagcggcctggatgaaagagcggacttcacctggggcgattcactactgtgcctcgaccagtgaggagagctggaccgacagcgaggtggactcatcatgctccgggcagcccatccacctgtggcagttcctcaaggagttgctactcaagccccacagctatggccgcttcattaggtggctcaacaaggagaagggcatcttcaaaattgaggactcagcccaggtggcccggctgtggggcatccgcaagaaccgtcccgccatgaactacgacaagctgagccgctccatccgccagtattacaagaagggcatcatccggaagccagacatctcccagcgcctcgtctaccagttcgtgcaccccatctgagtgcctggcccagggcctgaaacccgccctcaggggcctctctcctgcctgccctgcctcagccaggccctgagatgggggaaaacgggcagtctgctctgctgctctgaccttccagagcccaaggtcagggaggggcaaccaactgccccagggggatatgggtcctctggggccttcgggaccatggggcaggggtgcttcctcctcaggcccagctgctcccctggaggacagagggagacagggctgctccccaacacctgcctctgaccccagcatttccagagcagagcctacagaagggcagtgactcgacaaaggccacaggcagtccaggcctctctctgctccatccccctgcctcccattctgcaccacacctggcatggtgcagggagacatctgcacccctgagttgggcagccaggagtgcccccgggaatggataataaagatactagagaactg

SEQ ID NO: 100 - protein, 335 aa, human organism
MGSASPGLSSVSPSHLLLPPDTVSRTGLEKAAAGAVGLERRDWSPSPPATPEQGLSAFYLSYFDMLYPEDSSWAAKAPGASSREEPPEEPEQCPVIDSQAPAGSLDLVPGGLTLEEHSLEQVQSMVVGEVLKDIETACKLLNITADPMDWSPSNVQKWLLWTEHQYRLPPMGKAFQELAGKELCAMSEEQFRQRSPLGGDVLHAHLDIWKSAAWMKERTSPGAIHYCASTSEESWTDSEVDSSCSGQPIHLWQFLKELLLKPHSYGRFIRWLNKEKGIFKIEDSAQVARLWGIRKNRPAMNYDKLSRSIRQYYKKGIIRKPDISQRLVYQFVHPI

SEQ ID NO: 101 - DNA, 2664 bp, human organism
gagagaacagcgtgagcctgtgtgcttgtgtgctgagccctcatcccctcctggggccaggcttgggtttcacctgcagaatcgcttgtgctgggctgcctgggctgtcctcagtggcacctgcatgaagccgttctggctgccagagctggacagccccaggaaaacccacctctctgcagagcttgcccagctgtccccgggaagccaaatgcctctcatgtaagtcttctgctcgacggggtgtctcctaaaccctcactcttcagcctctgtttgaccatgaaatgaagtgactgagctctattctgtacctgccactctatttctggggtgacttttgtcagctgcccagaatctccaagccaggctggttctctgcatcctttcaatgacctgttttcttctgtaaccacaggttcggtggtgagaggaagcctcgcagaatccagcagaatcctcacagaatccagcagcagctctgctggggacatggtccatggtgcaacccacagcaaagccctgacctgacctcctgatgctcaggagaagccatgggcccctcctgtcctgtgttcctgtccttcacaaagctcagcctgtggtggctccttctgaccccagcaggtggagaggaagctaagcgcccacctcccagggctcctggagacccactctcctctcccagtcccacggcattgccgcagggaggctcgcataccgagactgaggaccggctcttcaaacacctcttccggggctacaaccgctgggcgcgcccggtgcccaacacttcagacgtggtgattgtgcgctttggactgtccatcgctcagctcatcgatgtggatgagaagaaccaaatgatgaccaccaacgtctggctaaaacaggagtggagcgactacaaactgcgctggaaccccgctgattttggcaacatcacatctctcagggtcccttctgagatgatctggatccccgacattgttctctacaacaatgcagatggggagtttgcagtgacccacatgaccaaggcccacctcttctccacgggcactgtgcactgggtgcccccggccatctacaagagctcctgcagcatcgacgtcaccttcttccccttcgaccagcagaactgcaagatgaagtttggctcctggacttatgacaaggccaagatcgacctggagcagatggagcagactgtggacctgaaggactactgggagagcggcgagtgggccatcgtcaatgccacgggcacctacaacagcaagaagtacgactgctgcgccgagatctaccccgacgtcacctacgccttcgtcatccggcggctgccgctcttctacaccatcaacctcatcatcccctgcctgctcatctcctgcctcactgtgctggtcttctacctgccctccgactgcggcgagaagatcacgctgtgcatttcggtgctgctgtcactcaccgtcttcctgctgctcatcactgagatcatcccgtccacctcgctggtcatcccgctcatcggcgagtacctgctgttcaccatgatcttcgtcaccctgtccatcgtcatcaccgtcttcgtgctcaatgtgcaccaccgctcccccagcacccacaccatgccccactgggtgcggggggcccttctgggctgtgtgccccggtggcttctgatgaaccggcccccaccacccgtggagctctgccaccccctacgcctgaagctcagcccctcttatcactggctggagagcaacgtggatgccgaggagagggaggtggtggtggaggaggaggacagatgggcatgtgcaggtcatgtggccccctctgtgggcaccctctgcagccacggccacctgcactctggggcctcaggtcccaaggctgaggctctgctgcaggagggtgagctgctgctatcaccccacatgcagaaggcactggaaggtgtgcactacattgccgaccacctgcggtctgaggatgctgactcttcggtgaaggaggactggaagtatgttgccatggtcatcgacaggatcttcctctggctgtttatcatcgtctgcttcctggggaccatcggcctctttctgcctccgttcctagctggaatgatctgactgcacctccctcgagctggctcccagggcaaaggggagggttcttggatgtggaagggctttgaacaatgtttagatttggagatgagcccaaagtgccagggagaacagccaggtgaggtgggaggttggagagccaggtgaggtctctctaagtcaggctggggttgaagtttggagtctgtccgagtttgcagggtgctgagctgtatggtccagcaggggagtaataagggctcttccggaaggggaggaagcgggaggcaggcctgcacctgatgtggaggtacaggcagatcttccctaccggggagggatggatggttggatacaggtggctgggctattccatccatctggaagcacatttgagcctccaggcttctccttgacgtcattcctctccttccttgctgcaaaatggctctgcaccagccggcccccaggaggtctggcagagctgagagccatggcctgcaggggctccatatgtccctacgcgtgcagcaggcaaacaaga

SEQ ID NO: 102 - protein, 529 aa, human organism
MGPSCPVFLSFTKLSLWWLLLTPAGGEEAKRPPPRAPGDPLSSPSPTALPQGGSHTETEDRLFKHLFRGYNRWARPVPNTSDVVIVRFGLSIAQLIDVDEKNQMMTTNVWLKQEWSDYKLRWNPADFGNITSLRVPSEMIWIPDIVLYNNADGEFAVTHMTKAHLFSTGTVHWVPPAIYKSSCSIDVTFFPFDQQNCKMKFGSWTYDKAKIDLEQMEQTVDLKDYWESGEWAIVNATGTYNSKKYDCCAEIYPDVTYAFVIRRLPLFYTINLIIPCLLISCLTVLVFYLPSDCGEKITLCISVLLSLTVFLLLITEIIPSTSLVIPLIGEYLLFTMIFVTLSIVITVFVLNVHHRSPSTHTMPHWVRGALLGCVPRWLLMNRPPPPVELCHPLRLKLSPSYHWLESNVDAEEREVVVEEEDRWACAGHVAPSVGTLCSHGHLHSGASGPKAEALLQEGELLLSPHMQKALEGVHYIADHLRSEDADSSVKEDWKYVAMVIDRIFLWLFIIVCFLGTIGLFLPPFLAGMI

SEQ ID NO: 103 - DNA, 1181 bp, human organism
cacgaggctggaaggggccacttcacacctcgggctcggcataaagcggccgccggccgccggcccccagacgcgccgccgctgccatggcccagcccctgtgcccgccgctctccgagtcctggatgctctctgcggcctggggcccaactcggcggccgccgccctccgacaaggactgcggccgctccctcgtctcgtccccagactcatggggcagcaccccagccgacagccccgtggcgagccccgcgcggccaggcaccctccgggacccccgcgccccctccgtaggtaggcgcggcgcgcgcagcagccgcctgggcagcgggcagaggcagagcgccagtgagcgggagaaactgcgcatgcgcacgctggcccgcgccctgcacgagctgcgccgctttctaccgccgtccgtggcgcccgcgggccagagcctgaccaagatcgagacgctgcgcctggctatccgctatatcggccacctgtcggccgtgctaggcctcagcgaggagagtctccagcgccggtgccggcagcgcggtgacgcggggtcccctcggggctgcccgctgtgccccgacgactgccccgcgcagatgcagacacggacgcaggctgaggggcaggggcaggggcgcgggctgggcctggtatccgccgtccgcgccggggcgtcctggggatccccgcctgcctgccccggagcccgagctgcacccgagccgcgcgacccgcctgcgctgttcgccgaggcggcgtgcccggaagggcaggcgatggagccaagcccaccgtccccgctccttccgggcgacgtgctggctctgttggagacctggatgcccctctcgcctctggagtggctgcctgaggagcccaagtgacaagggacaactgacgccgtctctgtgagcaccgaggctttttggcctcagcaccttcgaagtggttccttggcagactgcctttcctggaagagggcacgggcgatcccgacgggggcattcctgcgggtgagagccgtccccaccgcggcggcccttctcagcccctccctccatggagggacccatagggctagacactttgaggcaagcaggaggctctgcctaatgtgaatttatttatttgtgaataaactgtactggtgtcaaaaaaaaaaaaaaaaaaaa

SEQ ID NO: 104 - protein, 268 aa, human organism
MAQPLCPPLSESWMLSAAWGPTRRPPPSDKDCGRSLVSSPDSWGSTPADSPVASPARPGTLRDPRAPSVGRRGARSSRLGSGQRQSASEREKLRMRTLARALHELRRFLPPSVAPAGQSLTKIETLRLAIRYIGHLSAVLGLSEESLQRRCRQRGDAGSPRGCPLCPDDCPAQMQTRTQAEGQGQGRGLGLVSAVRAGASWGSPPACPGARAAPEPRDPPALFAEAACPEGQAMEPSPPSPLLPGDVLALLETWMPLSPLEWLPEEPK

SEQ ID NO: 105 - DNA, 3810 bp, human organism
ccacggagaagcccaccgatgcctacggagagctggacttcacgggggccggccgcaagcacagcaatttcctccggctctctgaccgaacggatccagctgcagtttatagtctggtcacacgcacatggggcttccgtgccccgaacctggtggtgtcagtgctggggggatcggggggccccgtcctccagacctggctgcaggacctgctgcgtcgtgggctggtgcgggctgcccagagcacaggagcctggattgtcactgggggtctgcacacgggcatcggccggcatgttggtgtggctgtacgggaccatcagatggccagcactgggggcaccaaggtggtggccatgggtgtggccccctggggtgtggtccggaatagagacaccctcatcaaccccaagggctcgttccctgcgaggtaccggtggcgcggtgacccggaggacggggtccagtttcccctggactacaactactcggccttcttcctggtggacgacggcacacacggctgcctggggggcgagaaccgcttccgcttgcgcctggagtcctacatctcacagcagaagacgggcgtgggagggactggaattgacatccctgtcctgctcctcctgattgatggtgatgagaagatgttgacgcgaatagagaacgccacccaggctcagctcccatgtctcctcgtggctggctcagggggagctgcggactgcctggcggagaccctggaagacactctggccccagggagtgggggagccaggcaaggcgaagcccgagatcgaatcaggcgtttctttcccaaaggggaccttgaggtcctgcaggcccaggtggagaggattatgacccggaaggagctcctgacagtctattcttctgaggatgggtctgaggaattcgagaccatagttttgaaggcccttgtgaaggcctgtgggagctcggaggcctcagcctacctggatgagctgcgtttggctgtggcttggaaccgcgtggacattgcccagagtgaactctttcggggggacatccaatggcggtccttccatctcgaagcttccctcatggacgccctgctgaatgaccggcctgagttcgtgcgcttgctcatttcccacggcctcagcctgggccacttcctgaccccgatgcgcctggcccaactctacagcgcggcgccctccaactcgctcatccgcaaccttttggaccaggcgtcccacagcgcaggcaccaaagccccagccctaaaagggggagctgcggagctccggccccctgacgtggggcatgtgctgaggatgctgctggggaagatgtgcgcgccgaggtacccctccgggggcgcctgggaccctcacccaggccagggcttcggggagagcatgtatctgctctcggacaaggccacctcgccgctctcgctggatgctggcctcgggcaggccccctggagcgacctgcttctttgggcactgttgctgaacagggcacagatggccatgtacttctgggagatgggttccaatgcagtttcctcagctcttggggcctgtttgctgctccgggtgatggcacgcctggagcctgacgctgaggaggcagcacggaggaaagacctggcgttcaagtttgaggggatgggcgttgacctctttggcgagtgctatcgcagcagtgaggtgagggctgcccgcctcctcctccgtcgctgcccgctctggggggatgccacttgcctccagctggccatgcaagctgacgcccgtgccttctttgcccaggatggggtacagtctctgctgacacagaagtggtggggagatatggccagcactacacccatctgggccctggttctcgccttcttttgccctccactcatctacacccgcctcatcaccttcaggaaatcagaagaggagcccacacgggaggagctagagtttgacatggatagtgtcattaatggggaagggcctgtcgggacggcggacccagccgagaagacgccgctgggggtcccgcgccagtcgggccgtccgggttgctgcgggggccgctgcggggggcgccggtgcctacgccgctggttccacttctggggcgcgccggtgaccatcttcatgggcaacgtggtcagctacctgctgttcttgctgcttttctcgcgggtgctgctcgtggatttccagccggcgccgcccggctccctggagctgctgctctatttctgggctttcacgctgctgtgcgaggaactgcgccagggcctgagcggaggcgggggcagcctcgccagcgggggccccgggcctggccatgcctcactgagccagcgcctgcgcctctacctcgccgacagctggaaccagtgcgacctagtggctctcacctgcttcctcctgggcgtgggctgccggctgaccccgggtttgtaccacctgggccgcactgtcctctgcatcgacttcatggttttcacggtgcggctgcttcacatcttcacggtcaacaaacagctggggcccaagatcgtcatcgtgagcaagatgatgaaggacgtgttcttcttcctcttcttcctcggcgtgtggctggtagcctatggcgtggccacggaggggctcctgaggccacgggacagtgacttcccaagtatcctgcgccgcgtcttctaccgtccctacctgcagatcttcgggcagattccccaggaggacatggacgtggccctcatggagcacagcaactgctcgtcggagcccggcttctgggcacaccctcctggggcccaggcgggcacctgcgtctcccagtatgccaactggctggtggtgctgctcctcgtcatcttcctgctcgtggccaacatcctgctggtcaacttgctcattgccatgttcagttacacattcggcaaagtacagggcaacagcgatctctactggaaggcgcagcgttaccgcctcatccgggaattccactctcggcccgcgctggccccgccctttatcgtcatctcccacttgcgcctcctgctcaggcaattgtgcaggcgaccccggagcccccagccgtcctccccggccctcgagcatttccgggtttacctttctaaggaagccgagcggaagctgctaacgtgggaatcggtgcataaggagaactttctgctggcacgcgctagggacaagcgggagagcgactccgagcgtctggagcgcacgtcccagaaggtggacttggcactgaaacagctgggacacatccgcgagtacgaacagcgcctgaaagtgctggagcgggaggtccagcagtgtagccgcgtcctggggtgggtgacgtaggccgttagcagctctgccatgttgccctcaggtgggccgccaccccttgacctgcatgggtccaaagagtgagccatgctggcggattttaaggagaagcccccacaggggattttgctcttagagtaaggctcatgtgggcctcggcccccgcacctggtggccttgtccttgaggtgagccccatgtccatctgggccactgtcaggaccacctttgggagtgtcatccttacaaaccacagcatgcccggctcctcccagaaccagtcccagcctgggaggatcaaggcctggatcccgggccgttatccatctggaggctgcagggtccttggggtaacagggaccacagacccctcaccactcacagattcctcacactggggaaataaagccatttcagaggaaaaaaaaaaaaaaaaaaaaaaaaaaaa

SEQ ID NO: 106 - protein, 1016 aa, human organism
MASTGGTKVVAMGVAPWGVVRNRDTLINPKGSFPARYRWRGDPEDGVQFPLDYNYSAFFLVDDGTHGCLGGENRFRLRLESYISQQKTGVGGTGIDIPVLLLLIDGDEKMLTRIENATQAQLPCLLVAGSGGAADCLAETLEDTLAPGSGGARQGEARDRIRRFFPKGDLEVLQAQVERIMTRKELLTVYSSEDGSEEFETIVLKALVKACGSSEASAYLDELRLAVAWNRVDIAQSELFRGDIQWRSFHLEASLMDALLNDRPEFVRLLISHGLSLGHFLTPMRLAQLYSAAPSNSLIRNLLDQASHSAGTKAPALKGGAAELRPPDVGHVLRMLLGKMCAPRYPSGGAWDPHPGQGFGESMYLLSDKATSPLSLDAGLGQAPWSDLLLWALLLNRAQMAMYFWEMGSNAVSSALGACLLLRVMARLEPDAEEAARRKDLAFKFEGMGVDLFGECYRSSEVRAARLLLRRCPLWGDATCLQLAMQADARAFFAQDGVQSLLTQKWWGDMASTTPIWALVLAFFCPPLIYTRLITFRKSEEEPTREELEFDMDSVINGEGPVGTADPAEKTPLGVPRQSGRPGCCGGRCGGRRCLRRWFHFWGAPVTIFMGNVVSYLLFLLLFSRVLLVDFQPAPPGSLELLLYFWAFTLLCEELRQGLSGGGGSLASGGPGPGHASLSQRLRLYLADSWNQCDLVALTCFLLGVGCRLTPGLYHLGRTVLCIDFMVFTVRLLHIFTVNKQLGPKIVIVSKMMKDVFFFLFFLGVWLVAYGVATEGLLRPRDSDFPSILRRVFYRPYLQIFGQIPQEDMDVALMEHSNCSSEPGFWAHPPGAQAGTCVSQYANWLVVLLLVIFLLVANILLVNLLIAMFSYTFGKVQGNSDLYWKAQRYRLIREFHSRPALAPPFIVISHLRLLLRQLCRRPRSPQPSSPALEHFRVYLSKEAERKLLTWESVHKENFLLARARDKRESDSERLERTSQKVDLALKQLGHIREYEQRLKVLEREVQQCSRVLGWVT

SEQ ID NO: 107 - DNA, 1378 bp, human organism
ggtagcagcatccaccgggcgggaggtcggaggcagcaaggccttaaaggctactgagtgcgccggccgttccgtgtccagaacctcccctactcctccgccttctcttccttggccgcccaccgccaagttccgactccggttttcgcctttgcaaagcctaaggaggaggttaggaacagccgcgcccccctccctgcggccgccgccccctgcctctcggctctgctccctgccgcgtgcgcctgggccgtgcgccccggcaggcgccagccatgtcgatgctgccgtcgtttggctttacgcaggagcaagtggcgtgcgtgtgcgaggttctgcagcaaggcggaaacctggagcgcctgggcaggttcctgtggtcactgcccgcctgcgaccacctgcacaagaacgagagcgtactcaaggccaaggcggtggtcgccttccaccgcggcaacttccgtgagctctacaagatcctggagagccaccagttctcgcctcacaaccaccccaaactgcagcaactgtggctgaaggcgcattacgtggaggccgagaagctgcgcggccgacccctgggcgccgtgggcaaatatcgggtgcgccgaaaatttccactgccgcgcaccatctgggacggcgaggagaccagctactgcttcaaggagaagtcgaggggtgtcctgcgggagtggtacgcgcacaatccctacccatcgccgcgtgagaagcgggagctggccgaggccaccggcctcaccaccacccaggtcagcaactggtttaagaaccggaggcaaagagaccgggccgcggaggccaaggaaagggagaacaccgaaaacaataactcctcctccaacaagcagaaccaactctctcctctggaagggggcaagccgctcatgtccagctcagaagaggaattctcacctccccaaagtccagaccagaactcggtccttctgctgcagggcaatatgggccacgccaggagctcaaactattctctcccgggcttaacagcctcgcagcccagtcacggcctgcagacccaccagcatcagctccaagactctctgctcggccccctcacctccagtctggtggacttggggtcctaagtggggagggactggggcctcgaagggattcctggagcagcaaccactgcagcgactagggacacttgtaaatagaaatcaggaacatttttgcagcttgtttctggagttgtttgcgcataaaggaatggtggactttcacaaatatctttttaaaaatcaaaaccaacagcgatctcaagcttaatctcctcttctctccaactctttccacttttgcattttccttcccaatgcagagatcaggg

SEQ ID NO: 108 - protein, 284 aa, human organism
MSMLPSFGFTQEQVACVCEVLQQGGNLERLGRFLWSLPACDHLHKNESVLKAKAVVAFHRGNFRELYKILESHQFSPHNHPKLQQLWLKAHYVEAEKLRGRPLGAVGKYRVRRKFPLPRTIWDGEETSYCFKEKSRGVLREWYAHNPYPSPREKRELAEATGLTTTQVSNWFKNRRQRDRAAEAKERENTENNNSSSNKQNQLSPLEGGKPLMSSSEEEFSPPQSPDQNSVLLLQGNMGHARSSNYSLPGLTASQPSHGLQTHQHQLQDSLLGPLTSSLVDLGS

SEQ ID NO: 109 - DNA, 3885 bp, human organism
ggggctccgcgggcctggagcacggccgggtctaatatgcccggagccgaggcgcgatgaaggagaagtccaagaatgcggccaagaccaggagggagaaggaaaatggcgagttttacgagcttgccaagctgctcccgctgccgtcggccatcacttcgcagctggacaaagcgtccatcatccgcctcaccacgagctacctgaagatgcgcgccgtcttccccgaaggtttaggagacgcgtggggacagccgagccgcgccgggcccctggacggcgtcgccaaggagctgggatcgcacttgctgcagactttggatggatttgtttttgtggtagcatctgatggcaaaatcatgtatatatccgagaccgcttctgtccatttaggcttatcccaggtggagctcacgggcaacagtatttatgaatacatccatccttctgaccacgatgagatgaccgctgtcctcacggcccaccagccgctgcaccaccacctgctccaagagtatgagatagagaggtcgttctttcttcgaatgaaatgtgtcttggcgaaaaggaacgcgggcctgacctgcagcggatacaaggtcatccactgcagtggctacttgaagatcaggcagtatatgctggacatgtccctgtacgactcctgctaccagattgtggggctggtggccgtgggccagtcgctgccacccagtgccatcaccgagatcaagctgtacagtaacatgttcatgttcagggccagccttgacctgaagctgatattcctggattccagggtgaccgaggtgacgggttacgagccgcaggacctgatcgagaagaccctataccatcacgtgcacggctgcgacgtgttccacctccgctacgcacaccacctcctgttggtgaagggccaggtcaccaccaagtactaccggctgctgtccaagcggggcggctgggtgtgggtgcagagctacgccaccgtggtgcacaacagccgctcgtcccggccccactgcatcgtgagtgtcaattatgtactcacggagattgaatacaaggaacttcagctgtccctggagcaggtgtccactgccaagtcccaggactcctggaggaccgccttgtctacctcacaagaaactaggaaattagtgaaacccaaaaataccaagatgaagacaaagctgagaacaaacccttaccccccacagcaatacagctcgttccaaatggacaaactggaatgcggccagctcggaaactggagagccagtccccctgcaagcgctgctgctcctccagaactgcagccccactcagaaagcagtgaccttctgtacacgccatcctacagcctgcccttctcctaccattacggacacttccctctggactctcacgtcttcagcagcaaaaagccaatgttgccggccaagttcgggcagccccaaggatccccttgtgaggtggcacgctttttcctgagcacactgccagccagcggtgaatgccagtggcattatgccaaccccctagtgcctagcagctcgtctccagctaaaaatcctccagagccaccggcgaacactgctaggcacagcctggtgccaagctacgaagcgcccgccgccgccgtgcgcaggttcggcgaggacaccgcgcccccgagcttcccgagctgcggccactaccgcgaggagcccgcgctgggcccggccaaagccgcccgccaggccgcccgggacggggcgcggctggcgctggcccgcgcggcacccgagtgctgcgcgcccccgacccccgaggccccgggcgcgccggcgcagctgcccttcgtgctgctcaactaccaccgcgtgctggcccggcgcggaccgctggggggcgccgcacccgccgcctccggcctggcctgcgctcccggcggccccgaggcggcgaccggcgcgctgcggctccggcacccgagccccgccgccacctccccgcccggcgcgcccctgccgcactacctgggcgcctcggtcatcatcaccaacgggaggtgacccgctggccgcccgcgccaggagcctggacccggcctcccggggctgcggcgccaccgagcccggcaaatgcgcacgacctacattaatttatgcagagacagctgtttgaattggaccccgccgccgacttgcggatttccaccgcggaggccccgcgcgccggtgccgagggccgaggagcgcccgggtccgggcaggtgaccgcccgcctctgtcctgcgagggccggtgcgacccagttgctgggggcttggtttcctcaccttgaaatcgggcttcacgcgtcttgccttgtccccaacgttccacaacagtcccgctgggggattgaagcggtttcactccgcaaatatcctccactttcaggagggaaaacccaccctaccacagtccgctcttccaagtggacggcagacctgggaggggacgcctgtgtcacgagcccttttagatgcttaggtgaaggcagaagtgatgattgtaagtcccatgaatacacaactccactgtctttaaaagtcattcaagagtctcattatttttgtttttatttaaccctttcttcaatacaaaaagccaacaaaccaagactaagggggtgaccatgcaattccattttgtgtctgtgaacataggtgtgcttcccaaatacattaacaagctcttacttccccctaacccctatgaactcttgataacaccaagagtagcaccttcagaatatattgaataggcattaaatgcaaaaatatatatgtagccagacagtttatgagaatgaccctgtcaagcttcattattacgtggcaaaatccctctggcccacacagatctgtaattcactaggctcgtgtttgctacaaatagtgctaataaagttaaattgcacgtgcaatacggaacactgtcaatggactgcaccttgtgaaggaaaaacatgcttaagggggtgtaatgaaaatgatgtagacattttaagcattttctacacagcgagaaaacttcgtaagaacatgttacgtgtgcaacaggtaaacagaaatcctttcataaagcaccagcagtgtttaaaaaatgagcttccattaatttttactttttatgggttttgcttaaagatctcaacatggaaaaatcctgtcatggctctgaactgcacaatgcattgaaccgccgtccttcaattttcttcacactatcaacactgcagcattttgctgctttatcaaaatggtttattttaggaaactttttccacctttctgaatggaaagaggttttcacaaatgttttaaactcatcgttctaaaatcaagtgcacctacaccaactgctctcaaaatgtgaactgacttttttttttttttttttgccaaccctgtgtcacttagtgaggacctgacacaatccctacagggtgtctgtcagtgggcctcatggtaagagtcacaatttgcaaatttaggaccgtgggtcatgcagcgaaggggctggatggtaggaagggatgtgcccgcctctccacgcactcagctatacctcattcacagctccttgtgagtgtgtgcacaggaaataagccgagggtattatttttttatgttcatgagtcttgtaattaaaccgtgattcttgaaaggtgtaggtttgattactaggagataccaccgacatttttcaataaagtactgcaaaatgcttttgtgtctaccttgttattaacttttggggctgtatttagtaaaaataaatcaaggctatcggagcagttcaataacaaaggttactgttgagaaaaaagaccctatcatagatttacaag

SEQ ID NO: 110 - protein, 667 aa, human organism
MKEKSKNAAKTRREKENGEFYELAKLLPLPSAITSQLDKASIIRLTTSYLKMRAVFPEGLGDAWGQPSRAGPLDGVAKELGSHLLQTLDGFVFVVASDGKIMYISETASVHLGLSQVELTGNSIYEYIHPSDHDEMTAVLTAHQPLHHHLLQEYEIERSFFLRMKCVLAKRNAGLTCSGYKVIHCSGYLKIRQYMLDMSLYDSCYQIVGLVAVGQSLPPSAITEIKLYSNMFMFRASLDLKLIFLDSRVTEVTGYEPQDLIEKTLYHHVHGCDVFHLRYAHHLLLVKGQVTTKYYRLLSKRGGWVWVQSYATVVHNSRSSRPHCIVSVNYVLTEIEYKELQLSLEQVSTAKSQDSWRTALSTSQETRKLVKPKNTKMKTKLRTNPYPPQQYSSFQMDKLECGQLGNWRASPPASAAAPPELQPHSESSDLLYTPSYSLPFSYHYGHFPLDSHVFSSKKPMLPAKFGQPQGSPCEVARFFLSTLPASGECQWHYANPLVPSSSSPAKNPPEPPANTARHSLVPSYEAPAAAVRRFGEDTAPPSFPSCGHYREEPALGPAKAARQAARDGARLALARAAPECCAPPTPEAPGAPAQLPFVLLNYHRVLARRGPLGGAAPAASGLACAPGGPEAATGALRLRHPSPAATSPPGAPLPHYLGASVIITNGR

SEQ ID NO: 111 - DNA, 1804 bp, human organism
atgaacggacgctgcatctgcccgtccctgccctactcacccgtcagctccccgcagtcctcgcctcggctgccccggcggccgacagtggagtctcaccacgtctccatcacgggtatgcaggactgtgtgcagctgaatcagtataccctgaaggatgaaattggaaagggctcctatggtgtcgtcaagttggcctacaatgaaaatgacaatacctactatgcaatgaaggtgctgtccaaaaagaagctgatccggcaggccggctttccacgtcgccctccaccccgaggcacccggccagctcctggaggctgcatccagcccaggggccccattgagcaggtgtaccaggaaattgccatcctcaagaagctggaccaccccaatgtggtgaagctggtggaggtcctggatgaccccaatgaggaccatctgtacatggtgttcgaactggtcaaccaagggcccgtgatggaagtgcccaccctcaaaccactctctgaagaccaggcccgtttctacttccaggatctgatcaaaggcatcgagtacttacactaccagaagatcatccaccgtgacatcaaaccttccaacctcctggtcggagaagatgggcacatcaagatcgctgactttggtgtgagcaatgaattcaagggcagtgacgcgctcctctccaacaccgtgggcacgcccgccttcatggcacccgagtcgctctctgagacccgcaagatcttctctgggaaggccttggatgtttgggccatgggtgtgacactatactgctttgtctttggccagtgcccattcatggacgagcggatcatgtgtttacacagtaagatcaagagtcaggccctggaatttccagaccagcccgacatagctgaggacttgaaggacctgatcacccgtatgctggacaagaaccccgagtcgaggatcgtggtgccggaaatcaagctgcacccctgggtcacgaggcatggggcggagccgttgccgtcggaggatgagaactgcacgctggtcgaagtgactgaagaggaggtcgagaactcagtcaaacacattcccagcttggcaaccgtgatcctggtgaagaccatgatacgtaaacgctcctttgggaacccattcgagggcagccggcgggaggaacgctcactgtcagcgcctggaaacttgctcaccaaaaaaccaaccagggaatgtgagtccctgtctgagctcaagacctagaaaataagtccccttcctgcctgttgcaaagtaacgtaagagttccctcacccgagtggatgcagacgttcttgctgtcagccaccttccttcatacacatagccagcccagggtgaccagaacgtcccaggacagatgaggctttgtgtccttatgagagtgggagaacctggtgggcacccctggtgcaggtgctgtggtgggtggggaccccactgcctttcccactgagcacatcatggctacctgacttggtgggagttccattcagtcacttctgtttcttaaacatagctttactgaggtacaattcacataccatgtaattcacccacgggaagtgtatgattcagtggtttctaatacacacttctgcagccattaccaccgtcaactttacgacattttcatcagcccaagaagacaccctacactccttagctgtccccatccaactcccccaccccagtaaccactcagaataggtatggatttgcctattctggacgtttcgtataaatggcgtcatacactaaaaaaaaaaaaaaa

SEQ ID NO: 112 - protein, 417 aa, human organism
MNGRCICPSLPYSPVSSPQSSPRLPRRPTVESHHVSITGMQDCVQLNQYTLKDEIGKGSYGVVKLAYNENDNTYYAMKVLSKKKLIRQAGFPRRPPPRGTRPAPGGCIQPRGPIEQVYQEIAILKKLDHPNVVKLVEVLDDPNEDHLYMVFELVNQGPVMEVPTLKPLSEDQARFYFQDLIKGIEYLHYQKIIHRDIKPSNLLVGEDGHIKIADFGVSNEFKGSDALLSNTVGTPAFMAPESLSETRKIFSGKALDVWAMGVTLYCFVFGQCPFMDERIMCLHSKIKSQALEFPDQPDIAEDLKDLITRMLDKNPESRIVVPEIKLHPWVTRHGAEPLPSEDENCTLVEVTEEEVENSVKHIPSLATVILVKTMIRKRSFGNPFEGSRREERSLSAPGNLLTKKPTRECESLSELKT

SEQ ID NO: 113 - DNA, 429 bp, human organism
atgaaacctctgatatggacatggtcagatgttgaaggccagaggccggctctgctcatctgcacagctgcagcaggacccacgcagggagttaagggttatggcaagccctttgagccaagaagtgtgaaaaacatacactctactcctgcttacccagatgccacaatgcacagacaactcctggctccggtggaaggaaggatggcagagacattgaatcagaaactccatgttgccaatgtgctggaagatgaccccggctacctacctcacgtctacagcgaggaaggggagtgtggaggggccccatccctcagctctctggccagcttggaacaggagttgcaacctgatttgctggactctttgggttcaaaagcgactccgtttgaggaaatatattcagagtcaggtgttccttcctaa

SEQ ID NO: 114 - protein, 142 aa, human organism
MKPLIWTWSDVEGQRPALLICTAAAGPTQGVKGYGKPFEPRSVKNIHSTPAYPDATMHRQLLAPVEGRMAETLNQKLHVANVLEDDPGYLPHVYSEEGECGGAPSLSSLASLEQELQPDLLDSLGSKATPFEEIYSESGVPS

SEQ ID NO: 115 - DNA, 1270 bp, human organism
cgaatgcaggcgacttgcgagctgggagcgatttaaaacgctttggattcccccggcctgggtggggagagcgagctgggtgccccctagattccccgcccccgcacctcatgagccgaccctcggctccatggagcccggcaattatgccaccttggatggagccaaggatatcgaaggcttgctgggagcgggaggggggcggaatctggtcgcccactcccctctgaccagccacccagcggcgcctacgctgatgcctgctgtcaactatgcccccttggatctgccaggctcggcggagccgccaaagcaatgccacccatgccctggggtgccccaggggacgtccccagctcccgtgccttatggttactttggaggcgggtactactcctgccgagtgtcccggagctcgctgaaaccctgtgcccaggcagccaccctggccgcgtaccccgcggagactcccacggccggggaagagtaccccagtcgccccactgagtttgccttctatccgggatatccgggaacctaccacgctatggccagttacctggacgtgtctgtggtgcagactctgggtgctcctggagaaccgcgacatgactccctgttgcctgtggacagttaccagtcttgggctctcgctggtggctggaacagccagatgtgttgccagggagaacagaacccaccaggtcccttttggaaggcagcatttgcagactccagcgggcagcaccctcctgacgcctgcgcctttcgtcgcggccgcaagaaacgcattccgtacagcaaggggcagttgcgggagctggagcgggagtatgcggctaacaagttcatcaccaaggacaagaggcgcaagatctcggcagccaccagcctctcggagcgccagattaccatctggtttcagaaccgccgggtcaaagagaagaaggttctcgccaaggtgaagaacagcgctaccccttaagagatctccttgcctgggtgggaggagcgaaagtgggggtgtcctggggagaccagaaacctgccaagcccaggctggggccaaggactctgctgagaggcccctagagacaacacccttcccaggccactggctgctggactgttcctcaggagcggcctgggtacccagtatgtgcagggagacggaaccccatgtgacaggcccactccaccagggttcccaaagaacctggcccagtcataatcattcatcctcacagtggcaataatcacgataaccagt

SEQ ID NO: 116 - protein, 284 aa, human organism
MEPGNYATLDGAKDIEGLLGAGGGRNLVAHSPLTSHPAAPTLMPAVNYAPLDLPGSAEPPKQCHPCPGVPQGTSPAPVPYGYFGGGYYSCRVSRSSLKPCAQAATLAAYPAETPTAGEEYPSRPTEFAFYPGYPGTYHAMASYLDVSVVQTLGAPGEPRHDSLLPVDSYQSWALAGGWNSQMCCQGEQNPPGPFWKAAFADSSGQHPPDACAFRRGRKKRIPYSKGQLRELEREYAANKFITKDKRRKISAATSLSERQITIWFQNRRVKEKKVLAKVKNSATP

SEQ ID NO: 117 - DNA, 2856 bp, human organism
gtaaccgctactcccggacaccagaccaccgccttccgtacacaggggcccgcatcccaccctcccggacctaagagcctgggtcccctgtttccggaggtccgcttcccggcccccagattctggcatcccagccctcagtgtccaagacccaggcagcccgggtccccgcctcccggatccaggcgtccgggatctgcgccaccagaacctagcctcctgcagacctccgccatctgggggcactcaacctcctggagccaagggccccacgtcccacccagagaaactctcgtattcccagctcctagggccaaggaacccgggcgctccgaactcccagctttcggacatctggcacacggggcagagcagagaagctcagcgcccagcctggggaatttaaacactccagcttccaagagccaaggaacttcagtgctgtgaactcacaactctaaggagccctccaaagttccagtctccaggtgctgttactcaactcagtcctaggaacgtcgggtcctgggaaggagcccaagcgctcccagccagcttccaggcgctaagaaaccccggtgcttcccatcatggtggccgatcctcctcgagactccaaggggctcgcagcggcggagcccaccgccaacgggggcctggcgctggcctccatcgaggaccaaggcgcggcagcaggcggctactgcggttcccgggaccaggtgcgccgctgccttcgagccaacctgcttgtgctgctgacagtggtggccgtggtggccggcgtggcgctgggactgggggtgtcgggggccgggggtgcgctggcgttgggcccggagcgcttgagcgccttcgtcttcccgggcgagctgctgctgcgtctgctgcggatgatcatcttgccgctggtggtgtgcagcttgatcggcggcgccgccagcctggaccccggcgcgctcggccgtctgggcgcctgggcgctgctctttttcctggtcaccacgctgctggcgtcggcgctcggagtgggcttggcgctggctctgcagccgggcgccgcctccgccgccatcaacgcctccgtgggagccgcgggcagtgccgaaaatgcccccagcaaggaggtgctcgattcgttcctggatcttgcgagaaatatcttcccttccaacctggtgtcagcagcctttcgctcatactctaccacctatgaagagaggaatatcaccggaaccagggtgaaggtgcccgtggggcaggaggtggaggggatgaacatcctgggcttggtagtgtttgccatcgtctttggtgtggcgctgcggaagctggggcctgaaggggagctgcttatccgcttcttcaactccttcaatgaggccaccatggttctggtctcctggatcatgtggtacgcccctgtgggcatcatgttcctggtggctggcaagatcgtggagatggaggatgtgggtttactctttgcccgccttggcaagtacattctgtgctgcctgctgggtcacgccatccatgggctcctggtactgcccctcatctacttcctcttcacccgcaaaaacccctaccgcttcctgtggggcatcgtgacgccgctggccactgcctttgggacctcttccagttccgccacgctgccgctgatgatgaagtgcgtggaggagaataatggcgtggccaagcacatcagccgtttcatcctgcccatcggcgccaccgtcaacatggacggtgccgcgctcttccagtgcgtggccgcagtgttcattgcacagctcagccagcagtccttggacttcgtaaagatcatcaccatcctggtcacggccacagcgtccagcgtgggggcagcgggcatccctgctggaggtgtcctcactctggccatcatcctcgaagcagtcaacctcccggtcgaccatatctccttgatcctggctgtggactggctagtcgaccggtcctgtaccgtcctcaatgtagaaggtgacgctctgggggcaggactcctccaaaattatgtggaccgtacggagtcgagaagcacagagcctgagttgatacaagtgaagagtgagctgcccctggatccgctgccagtccccactgaggaaggaaaccccctcctcaaacactatcgggggcccgcaggggatgccacggtcgcctctgagaaggaatcagtcatgtaaaccccgggagggaccttccctgccctgctgggggtgctctttggacactggattatgaggaatggataaatggatgagctagggctctgggggtctgcctgcacactctggggagccaggggccccagcaccctccaggacaggagatctgggatgcctggctgctggagtacatgtgttcacaagggttactcctcaaaacccccagttctcactcatgtccccaactcaaggctagaaaacagcaagatggagaaataatgttctgctgcgtccccaccgtgacctgcctggcctcccctgtctcagggagcaggtcacaggtcaccatggggaattctagcccccactggggggatgttacaacaccatgctggttattttggcggctgtagttgtggggggatgtgtgtgtgcacgtgtgtgtgtgtgtgtgtgtgtgtgtgtgtgtgtgttctgtgacctcctgtccccatggtacgtcccaccctgtccccagatcccctattccctccacaataacagaaacactcccagggactctggggagaggctgaggacaaatacctgctgtcactccagaggacattttttttagcaataaaattgagtgtcaactatttaaaaaaaaaaaaaaaaa

SEQ ID NO: 118 - protein, 541 aa, human organism
MVADPPRDSKGLAAAEPTANGGLALASIEDQGAAAGGYCGSRDQVRRCLRANLLVLLTVVAVVAGVALGLGVSGAGGALALGPERLSAFVFPGELLLRLLRMIILPLVVCSLIGGAASLDPGALGRLGAWALLFFLVTTLLASALGVGLALALQPGAASAAINASVGAAGSAENAPSKEVLDSFLDLARNIFPSNLVSAAFRSYSTTYEERNITGTRVKVPVGQEVEGMNILGLVVFAIVFGVALRKLGPEGELLIRFFNSFNEATMVLVSWIMWYAPVGIMFLVAGKIVEMEDVGLLFARLGKYILCCLLGHAIHGLLVLPLIYFLFTRKNPYRFLWGIVTPLATAFGTSSSSATLPLMMKCVEENNGVAKHISRFILPIGATVNMDGAALFQCVAAVFIAQLSQQSLDFVKIITILVTATASSVGAAGIPAGGVLTLAIILEAVNLPVDHISLILAVDWLVDRSCTVLNVEGDALGAGLLQNYVDRTESRSTEPELIQVKSELPLDPLPVPTEEGNPLLKHYRGPAGDATVASEKESVM

SEQ ID NO: 119 - DNA, 1993 bp, human organism
ctagttaaggcggcacagggccgaggcgtagtgtgggtgactcctccgttccttgggtcccgtcgtctgtgatactgcagttcagccatggcagaaccgcagcccccgtccggcggcctcacggacgaggccgccctcagttgctgctccgacgcggaccccagtaccaaggattttctattgcagcagaccatgctacgagtgaaggatcctaagaagtcactggatttttatactagagttcttggaatgacgctaatccaaaaatgtgattttcccattatgaagttttcactctacttcttggcttatgaggataaaaatgacatccctaaagaaaaagatgaaaaaatagcctgggcgctctccagaaaagctacacttgagctgacacacaattggggcactgaagatgatgcgacccagagttaccacaatggcaattcagaccctcgaggattcggtcatattggaattgctgttcctgatgtatacagtgcttgtaaaaggtttgaagaactgggagtcaaatttgtgaagaaacctgatgatggtaaaatgaaaggcctggcatttattcaagatcctgatggctactggattgaaattttgaatcctaacaaaatggcaaccttaatgtagtgctgtgagaattctcctttgagatttcagaagaaaggaaacaatgtgattcaagatatttacataccagaagcatctaggactgatggatcactgtcccgattcaaattattcttcagtccatttccccttcctatttcagctgttccttttcacctaactgttcagtcattctggttttcaagcagtgctttatctcatgtccttgaatatagttgtgtaactttattttttaggtaataattagaacagttcccttcagaggctgcatttgccttcttctgccacctaaatattacttcccttcaaatctgcctttgaatcatcatttttaaaaaaaaattaacatgtttttgttgtagttatcttctggggtttcaattcctcagaaacaacttttttcacaacggaaaggaaagaacactagtgttctttcagtaaagtacaaagtgtttattttacaaaagagtaggtactcttgagagcaattcaaatcatgctgacaaggatactgatagaaaaagtgatttcttcttattataaagtacatttaaagttcaaggactaaccttatttatttgggaaaggggaggaggaaggaaatgatatggtacccagacactgggctaggctgcaactttatctcatttaatactcccagctgtcatgtgagaaagaaagcaggctaggcatgtgaaatcactttcatggattattaatggatttaagagggcatcaatcagctcaactcaagatttcataatcatttttagtatttagattgtgcctcaaagttgtagtacctcacaatacctccactggtttcctgttgtaaaaaccttcagtgagtttgaccattgtgctcttggctcttgggctggagtaccgtggtgagggagtaaacactagaagtctttagtacaaaactgctctagggacacctggtgattcctacacaagtgatgtttatatttctcataaagagtcttccctatcccaaggtcttcatgatgccagtagccatatatgataaattatgttcagtgataacttagttatcagaaatcagctcagtggtcttccccgccatgattcacatttgatgagtttttaaaaatcaaagtgattttgaaaatctctaatggctcagaaaataaaaacatccagtttgtggatgactatatttagatttctctagactctagtggaagacctttggaaaggccatgccaaccgtgcttgtactgctagaagcactttatgtttcctttttgggtgaaatggatttatgtgagtgctttaaacaaatagcaatacttatagactgaaataaaatgaaacttcaaataag

SEQ ID NO: 120 - protein, 184 aa, human organism
MAEPQPPSGGLTDEAALSCCSDADPSTKDFLLQQTMLRVKDPKKSLDFYTRVLGMTLIQKCDFPIMKFSLYFLAYEDKNDIPKEKDEKIAWALSRKATLELTHNWGTEDDATQSYHNGNSDPRGFGHIGIAVPDVYSACKRFEELGVKFVKKPDDGKMKGLAFIQDPDGYWIEILNPNKMATLM

SEQ ID NO: 121 - DNA, 808 bp, human organism
ccgacgccaggtcctgccgtcccgccgaccgtccgggagcgaacccgtcgtcccgcactggagtccgcgatggcttcagtgacagatggtaaacatggagtcaaagatgcctctgaccagaattttgactacatgtttaaactgcttatcattggcaacagcagtgttggcaagacctccttcctcttgcgctatgctgatgacacgttcaccccagccttcgttagcaccgtgggcatcgacttcaaggtgaagacagtctaccgtcacgagaagcgggtgaaactgcagatctgggacacagctgggcaggagcggtaccggaccatcacaacagcctattaccgtggggccatgggcttcattctgatgtatgacatcaccaatgaagagtccttcaatgctgtccaagactgggctactcagatcaagacctactcctgggacaatgcacaagttattctggtggggaacaagtgtgacatggaggaagagagggttgttcccactgagaagggccagctccttgcagagcagcttgggtttgatttctttgaagccagtgcaaaggagaacatcagtgtaaggcaggcctttgagcgcctggtggatgccatttgtgacaagatgtctgattcgctggacacagacccgtcgatgctgggctcctccaagaacacgcgtctctcggacaccccaccgctgctgcagcagaactgctcatgctagcaaggcccaccttcctgacctcccctcattgtggccccacacccaagtctgcttctccctgttacacactgtccgctct

SEQ ID NO: 122 - protein, 219 aa, human organism
MASVTDGKHGVKDASDQNFDYMFKLLIIGNSSVGKTSFLLRYADDTFTPAFVSTVGIDFKVKTVYRHEKRVKLQIWDTAGQERYRTITTAYYRGAMGFILMYDITNEESFNAVQDWATQIKTYSWDNAQVILVGNKCDMEEERVVPTEKGQLLAEQLGFDFFEASAKENISVRQAFERLVDAICDKMSDSLDTDPSMLGSSKNTRLSDTPPLLQQNCSC

SEQ ID NO: 123 - DNA, 5060 bp, human organism
acgcagagcgctgctgggctgccgggtctcccgcttcctcctcctgctccaagggcctcctgcatgagggcgcggtagagacccggacccgcgccgtgctcctgccgtttcgctgcgctccgcccgggcccggctcagccaggccccgcggtgagccatgattcgcctcggggctccccagtcgctggtgctgctgacgctgctcgtcgccgctgtccttcggtgtcagggccaggatgtccaggaggctggcagctgtgtgcaggatgggcagaggtataatgataaggatgtgtggaagccggagccctgccggatctgtgtctgtgacactgggactgtcctctgcgacgacataatctgtgaagacgtgaaagactgcctcagccctgagatccccttcggagagtgctgccccatctgcccaactgacctcgccactgccagtgggcaaccaggaccaaagggacagaaaggagaacctggagacatcaaggatattgtaggacccaaaggacctcctgggcctcagggacctgcaggggaacaaggacccagaggggatcgtggtgacaaaggtgaaaaaggtgcccctggacctcgtggcagagatggagaacctgggacccctggaaatcctggcccccctggtcctcccggcccccctggtccccctggtcttggtggaaactttgctgcccagatggctggaggatttgatgaaaaggctggtggcgcccagttgggagtaatgcaaggaccaatgggccccatgggacctcgaggacctccaggccctgcaggtgctcctgggcctcaaggatttcaaggcaatcctggtgaacctggtgaacctggtgtctctggtcccatgggtccccgtggtcctcctggtccccctggaaagcctggtgatgatggtgaagctggaaaacctggaaaagctggtgaaaggggtccgcctggtcctcagggtgctcgtggtttcccaggaaccccaggccttcctggtgtcaaaggtcacagaggttatccaggcctggacggtgctaagggagaggcgggtgctcctggtgtgaagggtgagagtggttccccgggtgagaacggatctccgggcccaatgggtcctcgtggcctgcctggtgaaagaggacggactggccctgctggcgctgcgggtgcccgaggcaacgatggtcagccaggccccgcaggtcctccgggtcctgtcggtcctgctggtggtcctggcttccctggtgctcctggagccaagggtgaagccggccccactggtgcccgtggtcctgaaggtgctcaaggtcctcgcggtgaacctggtactcctgggtcccctgggcctgctggtgcctccggtaaccctggaacagatggaattcctggagccaaaggatctgctggtgctcctggcattgctggtgctcctggcttccctgggccacggggtcctcctggccctcaaggtgcaactggtcctctgggcccgaaaggtcagacgggtgaacctggtattgctggcttcaaaggtgaacaaggccccaagggagaacctggccctgctggcccccagggagcccctggacccgctggtgaagaaggcaagagaggtgcccgtggagagcctggtggcgttgggcccatcggtccccctggagaaagaggtgctcccggaaaccgcggtttcccaggtcaagatggtctggcaggtcccaagggagcccctggagagcgagggcccagtggtcttgctggccccaagggagccaacggtgaccctggccgtcctggagaacctggccttcctggagcccggggtctcactggccgccctggtgatgctggtcctcaaggcaaagttggcccttctggagcccctggtgaagatggtcgtcctggacctccaggtcctcagggggctcgtgggcagcctggtgtcatgggtttccctggccccaaaggtgccaacggtgagcctggcaaagctggtgagaagggactgcctggtgctcctggtctgaggggtcttcctggcaaagatggtgagacaggtgctgcaggaccccctggccctgctggacctgctggtgaacgaggcgagcagggtgctcctgggccatctgggttccagggacttcctggccctcctggtcccccaggtgaaggtggaaaaccaggtgaccagggtgttcccggtgaagctggagcccctggcctcgtgggtcccaggggtgaacgaggtttcccaggtgaacgtggctctcccggtgcccagggcctccagggtccccgtggcctccccggcactcctggcactgatggtcccaaaggtgcatctggcccagcaggcccccctggcgcacagggccctccaggtcttcagggaatgcctggcgagaggggagcagctggtatcgctgggcccaaaggcgacaggggtgacgttggtgagaaaggccctgagggagcccctggaaaggatggtggacgaggcctgacaggtcccattggcccccctggcccagctggtgctaacggcgagaagggagaagttggacctcctggtcctgcaggaagtgctggtgctcgtggcgctccgggtgaacgtggagagactggcccccccggaccagcgggatttgctgggcctcctggtgctgatggccagcctggggccaagggtgagcaaggagaggccggccagaaaggcgatgctggtgcccctggtcctcagggcccctctggagcacctgggcctcagggtcctactggagtgactggtcctaaaggagcccgaggtgcccaaggccccccgggagccactggattccctggagctgctggccgcgttggacccccaggctccaatggcaaccctggaccccctggtccccctggtccttctggaaaagatggtcccaaaggtgctcgaggagacagcggcccccctggccgagctggtgaacccggcctccaaggtcctgctggaccccctggcgagaagggagagcctggagatgacggtccctctggtgccgaaggtccaccaggtccccagggtctggctggtcagagaggcatcgtcggtctgcctgggcaacgtggtgagagaggattccctggcttgcctggcccatcgggtgagcccggcaagcagggtgctcctggagcatctggagacagaggtcctcctggccccgtgggtcctcctggcctgacgggtcctgcaggtgaacccggacgagagggaagccccggtgctgatggcccccctggcagagatggcgctgctggagtcaagggtgatcgtggtgagactggtgctgtgggagctcctggagcccctgggccccctggctcccctggccccgctggtccaactggcaagcaaggagacagaggagaagctggtgcacaaggccccatgggaccctcaggaccagctggagcccggggaatccagggtcctcaaggccccagaggtgacaaaggagaggctggagagcctggcgagagaggcctgaagggacaccgtggcttcactggtctgcagggtctgcccggccctcctggtccttctggagaccaaggtgcttctggtcctgctggtccttctggccctagaggtcctcctggccccgtcggtccctctggcaaagatggtgctaatggaatccctggccccattgggcctcctggtccccgtggacgatcaggcgaaaccggtcctgctggtcctcctggaaatcctgggccccctggtcctccaggtccccctggccctggcatcgacatgtccgcctttgctggcttaggcccgagagagaagggccccgaccccctgcagtacatgcgggccgaccaggcagccggtggcctgagacagcatgacgccgaggtggatgccacactcaagtccctcaacaaccagattgagagcatccgcagccccgagggctcccgcaagaaccctgctcgcacctgcagagacctgaaactctgccaccctgagtggaagagtggagactactggattgaccccaaccaaggctgcaccttggacgccatgaaggttttctgcaacatggagactggcgagacttgcgtctaccccaatccagcaaacgttcccaagaagaactggtggagcagcaagagcaaggagaagaaacacatctggtttggagaaaccatcaatggtggcttccatttcagctatggagatgacaatctggctcccaacactgccaacgtccagatgaccttcctacgcctgctgtccacggaaggctcccagaacatcacctaccactgcaagaacagcattgcctatctggacgaagcagctggcaacctcaagaaggccctgctcatccagggctccaatgacgtggagatccgggcagagggcaatagcaggttcacgtacactgccctgaaggatggctgcacgaaacataccggtaagtggggcaagactgttatcgagtaccggtcacagaagacctcacgcctccccatcattgacattgcacccatggacataggagggcccgagcaggaattcggtgtggacatagggccggtctgcttcttgtaaaaacctgaacccagaaacaacacaatccgttgcaaacccaaaggacccaagtactttccaatctcagtcactctaggactctgcactgaatggctgacctgacctgatgtccattcatcccaccctctcacagttcggacttttctcccctctctttctaagagacctgaactgggcagactgcaaaataaaatctcggtgttctatttatttattgtcttcctgtaagaccttcgggtcaaggcagaggcaggaaactaactggtgtgagtcaaatgccccctgagtgactgcccccagcccaggccagaagacctcccttcaggtgccgggcgcaggaactgtgtgtgtcctacacaatggtgctattctgtgtcaaacacctctgtattttttaaaacatcaattgatattaaaaatgaaaagattattggaaagt

SEQ ID NO: 124 - protein, 1487 aa, human organism
MIRLGAPQSLVLLTLLVAAVLRCQGQDVQEAGSCVQDGQRYNDKDVWKPEPCRICVCDTGTVLCDDIICEDVKDCLSPEIPFGECCPICPTDLATASGQPGPKGQKGEPGDIKDIVGPKGPPGPQGPAGEQGPRGDRGDKGEKGAPGPRGRDGEPGTPGNPGPPGPPGPPGPPGLGGNFAAQMAGGFDEKAGGAQLGVMQGPMGPMGPRGPPGPAGAPGPQGFQGNPGEPGEPGVSGPMGPRGPPGPPGKPGDDGEAGKPGKAGERGPPGPQGARGFPGTPGLPGVKGHRGYPGLDGAKGEAGAPGVKGESGSPGENGSPGPMGPRGLPGERGRTGPAGAAGARGNDGQPGPAGPPGPVGPAGGPGFPGAPGAKGEAGPTGARGPEGAQGPRGEPGTPGSPGPAGASGNPGTDGIPGAKGSAGAPGIAGAPGFPGPRGPPGPQGATGPLGPKGQTGEPGIAGFKGEQGPKGEPGPAGPQGAPGPAGEEGKRGARGEPGGVGPIGPPGERGAPGNRGFPGQDGLAGPKGAPGERGPSGLAGPKGANGDPGRPGEPGLPGARGLTGRPGDAGPQGKVGPSGAPGEDGRPGPPGPQGARGQPGVMGFPGPKGANGEPGKAGEKGLPGAPGLRGLPGKDGETGAAGPPGPAGPAGERGEQGAPGPSGFQGLPGPPGPPGEGGKPGDQGVPGEAGAPGLVGPRGERGFPGERGSPGAQGLQGPRGLPGTPGTDGPKGASGPAGPPGAQGPPGLQGMPGERGAAGIAGPKGDRGDVGEKGPEGAPGKDGGRGLTGPIGPPGPAGANGEKGEVGPPGPAGSAGARGAPGERGETGPPGPAGFAGPPGADGQPGAKGEQGEAGQKGDAGAPGPQGPSGAPGPQGPTGVTGPKGARGAQGPPGATGFPGAAGRVGPPGSNGNPGPPGPPGPSGKDGPKGARGDSGPPGRAGEPGLQGPAGPPGEKGEPGDDGPSGAEGPPGPQGLAGQRGIVGLPGQRGERGFPGLPGPSGEPGKQGAPGASGDRGPPGPVGPPGLTGPAGEPGREGSPGADGPPGRDGAAGVKGDRGETGAVGAPGAPGPPGSPGPAGPTGKQGDRGEAGAQGPMGPSGPAGARGIQGPQGPRGDKGEAGEPGERGLKGHRGFTGLQGLPGPPGPSGDQGASGPAGPSGPRGPPGPVGPSGKDGANGIPGPIGPPGPRGRSGETGPAGPPGNPGPPGPPGPPGPGIDMSAFAGLGPREKGPDPLQYMRADQAAGGLRQHDAEVDATLKSLNNQIESIRSPEGSRKNPARTCRDLKLCHPEWKSGDYWIDPNQGCTLDAMKVFCNMETGETCVYPNPANVPKKNWWSSKSKEKKHIWFGETINGGFHFSYGDDNLAPNTANVQMTFLRLLSTEGSQNITYHCKNSIAYLDEAAGNLKKALLIQGSNDVEIRAEGNSRFTYTALKDGCTKHTGKWGKTVIEYRSQKTSRLPIIDIAPMDIGGPEQEFGVDIGPVCFL

SEQ ID NO: 125 - DNA, 1505 bp, human organism
gctggtcggaggctcgcagtgctgtcggcgagaagcagtcgggtttggagcgcttgggtcgcgttggtgcgcggtggaacgcgcccagggaccccagttcccgcgagcagctccgcgccgcgcctgagagactaagctgaaactgctgctcagctcccaagatggtgccacccaaattgcatgtgcttttctgcctctgcggctgcctggctgtggtttatccttttgactggcaatacataaatcctgttgcccatatgaaatcatcagcatgggtcaacaaaatacaagtactgatggctgctgcaagctttggccaaactaaaatcccccggggaaatgggccttattccgttggttgtacagacttaatgtttgatcacactaataagggcaccttcttgcgtttatattatccatcccaagataatgatcgccttgacaccctttggatcccaaataaagaatatttttggggtcttagcaaatttcttggaacacactggcttatgggcaacattttgaggttactctttggttcaatgacaactcctgcaaactggaattcccctctgaggcctggtgaaaaatatccacttgttgttttttctcatggtcttggggcattcaggacactttattctgctattggcattgacctggcatctcatgggtttatagttgctgctgtagaacacagagatagatctgcatctgcaacttactatttcaaggaccaatctgctgcagaaataggggacaagtcttggctctaccttagaaccctgaaacaagaggaggagacacatatacgaaatgagcaggtacggcaaagagcaaaagaatgttcccaagctctcagtctgattcttgacattgatcatggaaagccagtgaagaatgcattagatttaaagtttgatatggaacaactgaaggactctattgatagggaaaaaatagcagtaattggacattcttttggtggagcaacggttattcagactcttagtgaagatcagagattcagatgtggtattgccctggatgcatggatgtttccactgggtgatgaagtatattccagaattcctcagcccctcttttttatcaactctgaatatttccaatatcctgctaatatcataaaaatgaaaaaatgctactcacctgataaagaaagaaagatgattacaatcaggggttcagtccaccagaattttgctgacttcacttttgcaactggcaaaataattggacacatgctcaaattaaagggagacatagattcaaatgtagctattgatcttagcaacaaagcttcattagcattcttacaaaagcatttaggacttcataaagattttgatcagtgggactgcttgattgaaggagatgatgagaatcttattccagggaccaacattaacacaaccaatcaacacatcatgttacagaactcttcaggaatagagaaatacaattaggattaaaataggtttttt

SEQ ID NO: 126 - protein, 441 aa, human organism
MVPPKLHVLFCLCGCLAVVYPFDWQYINPVAHMKSSAWVNKIQVLMAAASFGQTKIPRGNGPYSVGCTDLMFDHTNKGTFLRLYYPSQDNDRLDTLWIPNKEYFWGLSKFLGTHWLMGNILRLLFGSMTTPANWNSPLRPGEKYPLVVFSHGLGAFRTLYSAIGIDLASHGFIVAAVEHRDRSASATYYFKDQSAAEIGDKSWLYLRTLKQEEETHIRNEQVRQRAKECSQALSLILDIDHGKPVKNALDLKFDMEQLKDSIDREKIAVIGHSFGGATVIQTLSEDQRFRCGIALDAWMFPLGDEVYSRIPQPLFFINSEYFQYPANIIKMKKCYSPDKERKMITIRGSVHQNFADFTFATGKIIGHMLKLKGDIDSNVAIDLSNKASLAFLQKHLGLHKDFDQWDCLIEGDDENLIPGTNINTTNQHIMLQNSSGIEKYN

SEQ ID NO: 127 - DNA, 1758 bp, human organism
cacgagcggcacgaggatttccagctcagcgatgcccccaggtccctgggagagctgcttctgggtggggggcctcattttgtggctcagcgttggaagttcaggggatgcacctcctaccccacagccaaagtgcgctgacttccagagcgccaacctttttgaaggcaccgatctcaaagtccagtttctcctctttgtcccttcgaatcctagctgtgggcagctagtagaaggaagcagtgacctccaaaactctgggttcaatgccactctgggaaccaaactaattatccatggattcagggttttaggaacaaagccttcctggattgacacatttattagaacccttctgcgtgcaacgaatgctaatgtgattgccgtggactggatttatgggtctacaggagtctacttctcagctgtgaaaaatgtgattaagttgagcctcgagatctcccttttcctcaataaactcctggtgctgggtgtgtcggaatcctcaatccacatcattggtgttagcctgggggcccacgttgggggcatggtgggacagctcttcggaggccagctgggacagatcacaggcctggaccccgctggacctgagtacaccagggccagtgtggaagagcgcttggatgctggagatgccctcttcgtggaagccatccacacagacaccgacaatttgggtattcggattcccgttggacatgtggactacttcgtcaacggaggccaagaccaacctggctgccccaccttcttttacgcaggttatagttatctgatctgtgatcacatgagggctgtgcacctctacatcagcgccctggagaattcctgtccactgatggcctttccctgtgccagctacaaggccttccttgctggacgctgtctggattgctttaacccttttctgctttcctgcccaaggataggactggtggaacaaggtggtgtcaagatagagccgctccccaaggaagtgaaagtctacctcctgactacttccagtgctccgtactgcatgcatcacagcctcgtggagtttcacttgaaggaactgagaaacaaggacaccaacatcgaggttaccttccttagcagtaacatcacctcttcatctaagatcaccatacctaagcagcaacgctatgggaaaggaatcatagcccatgccaccccacaatgccagataaaccaagtgaaattcaagtttcagtcttccaaccgagtttggaaaaaagaccggactaccattattgggaagttctgcactgcccttttgcctgtcaatgacagagaaaagatggtctgcttacctgaaccagtgaacttacaagcaagtgtgactgtttcctgtgacctgaagatagcctgtgtgtagtttaacctgggcaggacacatctccctgcattttttttttttttttttgagagagaggtgtgatgagggatgtgtgtgtgcagcttattgtagaccattactactaaggagaaaagcaaagctctttcttattttcctcataatcagctaccctggaggggagggagaactcattttacagaacttggtttcctttgccgatcttatgtacatacccattttagctttcccatgcatacttaactgcacttgctttatctccttgggcattcgtacttaggattcaatagaaacatgtacagggtaaacaattttttaaaaataaaacttcatggagtaaaaaaaaaaaaaaaaaa

SEQ ID NO: 128 - protein, 456 aa, human organism
MPPGPWESCFWVGGLILWLSVGSSGDAPPTPQPKCADFQSANLFEGTDLKVQFLLFVPSNPSCGQLVEGSSDLQNSGFNATLGTKLIIHGFRVLGTKPSWIDTFIRTLLRATNANVIAVDWIYGSTGVYFSAVKNVIKLSLEISLFLNKLLVLGVSESSIHIIGVSLGAHVGGMVGQLFGGQLGQITGLDPAGPEYTRASVEERLDAGDALFVEAIHTDTDNLGIRIPVGHVDYFVNGGQDQPGCPTFFYAGYSYLICDHMRAVHLYISALENSCPLMAFPCASYKAFLAGRCLDCFNPFLLSCPRIGLVEQGGVKIEPLPKEVKVYLLTTSSAPYCMHHSLVEFHLKELRNKDTNIEVTFLSSNITSSSKITIPKQQRYGKGIIAHATPQCQINQVKFKFQSSNRVWKKDRTTIIGKFCTALLPVNDREKMVCLPEPVNLQASVTVSCDLKIACV

SEQ ID NO: 129 - DNA, 2238 bp, human organism
cgttgccgggtcgcaggtcccgccagtgcgagcgcaacggaggtcgaaggcgttcagactcttagctgaacgcggagctgcggcggctatgctgtggagcggctgccggcgtttcggggcgcgcctcggctgcctgcccggcggtctccgggtcctcgtccagaccggccaccggagcttgacctcctgcatcgacccttccatgggacttaatgaagagcagaaagaatttcaaaaagtggcctttgactttgctgcccgagagatggctccaaatatggcagagtgggaccagaaggagctgttcccagtggatgtgatgcggaaggcagcccagctaggcttcggaggggtctacatacaaacagatgtgggcgggtctgggctgtcacgtcttgatacctctgtcatttttgaagccttggctacaggctgcaccagcaccacagcctatataagcatccacaacatgtgtgcctggatgattgatagcttcggaaatgaggaacagaggcacaaattttgcccaccgctctgtaccatggagaagtttgcttcctactgcctcactgaaccaggaagtgggagtgatgctgcctctcttctgacctccgctaagaaacagggagatcattacatcctcaatggctccaaggccttcatcagtggtgctggtgagtcagacatctatgtggtcatgtgccgaacaggaggaccaggccccaagggcatctcatgcatagttgttgagaaggggacccctggcctcagctttggcaagaaggagaaaaaggtggggtggaactcccagccaacacgagctgtgatcttcgaagactgtgctgtccctgtggccaacagaattgggagcgaggggcagggcttcctcattgccgtgagaggactgaacggagggaggatcaatattgcttcctgctccctgggggctgcccacgcctctgtcatcctcacccgagaccacctcaatgtccggaagcagtttggagagcctctggccagtaaccagtacttgcaattcacactggctgatatggcaacaaggctggtggccgcgcggctgatggtccgcaatgcagcagtggctctgcaggaggagaggaaggatgcagtggccttgtgctccatggccaagctctttgctacagatgaatgctttgccatctgcaaccaggccttgcagatgcacgggggctacggctacctgaaggattacgctgttcagcagtacgtgcgggactccagggtccaccagattctagaaggtagcaatgaagtgatgaggatactgatctctagaagcctgcttcaggagtagaacccacacttgttctggcctggtgttcagtgcgactgcagtcagtgttgagtggtgccatgtgggccgctctattccaaaggaatcatggattagacccaagggctgagctcctctagggcaggacctgcaccctgtgtgttggcaccagcatcgggtcttggactggggcagaatccccagtggaaccggaagagctggactgatgagaaacatcagaagaacacatactaccttgttttcctaatgccagaagggtgaccagtgaagattcaccgtcaaaccatgaaagtcctttcttggatccactttatcttgattagtctgcattttactagttcactggatccctcctctaggggcctggggactttcactgatgctcttcctgattctagagcaaaggtgtgggaaggggaaatggaggaatgccctcctgtctgtgtcgttctctgtgccacagctacagatgcagaaggtttctctggatagcacacctctgaatgtaaatcatgataaaatggatatttggaaacttactcctaagctgtgatgtagggtgtatttctacttctggactgcctcaatatcaagggctgagacttttgaatgttgaatattcgttgggtttcatgttaagacgcctgtggtccaggagtgctattcagtgtttctgttcctgataaacactttgaatatttttttgtgtttttgtttccttttctgaagctgttcctccttttaaatatttttaatcacattgataaaatctatccttcatccacctctggttctactatagttgatttttattttaaatgtttaattgtatttgattaaacacttaactggattttggaataataaaactctcgtccaatttggcttttaaaaaaaaaaaa

SEQ ID NO: 130 - protein, 415 aa, human organism
MLWSGCRRFGARLGCLPGGLRVLVQTGHRSLTSCIDPSMGLNEEQKEFQKVAFDFAAREMAPNMAEWDQKELFPVDVMRKAAQLGFGGVYIQTDVGGSGLSRLDTSVIFEALATGCTSTTAYISIHNMCAWMIDSFGNEEQRHKFCPPLCTMEKFASYCLTEPGSGSDAASLLTSAKKQGDHYILNGSKAFISGAGESDIYVVMCRTGGPGPKGISCIVVEKGTPGLSFGKKEKKVGWNSQPTRAVIFEDCAVPVANRIGSEGQGFLIAVRGLNGGRINIASCSLGAAHASVILTRDHLNVRKQFGEPLASNQYLQFTLADMATRLVAARLMVRNAAVALQEERKDAVALCSMAKLFATDECFAICNQALQMHGGYGYLKDYAVQQYVRDSRVHQILEGSNEVMRILISRSLLQE

SEQ ID NO: 131 - DNA, 6735 bp, human organism
gcctgcagagagaggcactttgcaccacagacagatagcaagaagggaaagacagagagtgagaaaaaagaggagtcagtcgctcctggggaagggagagagtgagactgggagaaagagaagcacagaaagtgtgtgtaaaacggagtaaagaaagaaaaaaaaaaaactacccttaaagcacatttaaaaaaaaaaaactctggcaattcaagaaagaaacaggctacgtttaaagagcatagagacaatgaaaggctaaagaaaattttaaaatctctgccacagtctcataggtgcttggaaatgaaagtagaactgcctgtctttaacggactctgacagaggtaactggattagggacgagtacgccagctttttttttttttttttttttttttttaacatcttaaatcctgaaaaaaaaaaaaaaaaaaaaaaaaaggcagcagctccgaattgaatgaattgatgggcacactccaactgctgggctggagagactggacttagtcttgccatttctgcttctttgaaagaggagacaacttgggcttccttttaatttagttttttttccccttctcccccaacccccaaccttcccccttacctcccccaccccctttatcaccaccccccttttaaataagagggtgaaggggaaccagagcgcacaagggaactgactcaggaggcagagaagatgggcatcctcagcgtagacttgctgatcacactgcaaattctgccagtttttttctccaactgcctcttcctggctctctatgactcggtcattctgctcaagcacgtggtgctgctgttgagccgctccaagtccactcgcggagagtggcggcgcatgctgacctcagagggactgcgctgcgtctggaagagcttcctcctcgatgcctacaaacaggtgaaattgggtgaggatgcccccaattccagtgtggtgcatgtctccagtacagaaggaggtgacaacagtggcaatggtacccaggagaagatagctgagggagccacatgccaccttcttgactttgccagccctgagcgcccactagtggtcaactttggctcagccacttgacctcctttcacgagccagctgccagccttccgcaaactggtggaagagttctcctcagtggctgacttcctgctggtctacattgatgaggctcatccatcagatggctgggcgataccgggggactcctctttgtcttttgaggtgaagaagcaccagaaccaggaagatcgatgtgcagcagcccagcagcttctggagcgtttctccttgccgccccagtgccgagttgtggctgaccgcatggacaataacgccaacatagcttacggggtagcctttgaacgtgtgtgcattgtgcagagacagaaaattgcttatctgggaggaaagggccccttctcctacaaccttcaagaagtccggcattggctggagaagaatttcagcaagagatgaaagaaaactagattagctggttaaaggtatgattataagagagcttattgttttaaaaagttatataaaggcaaggaaattaagaactgaatccatatttcaacagagccctattggcttactgaaagacaggagtttatctatcggaagaacatgaatctctaacagctccatacttctttcactactcaaatggcattgggctgagtaagtaaccatatcacctctcttcttagtaaaaagccctatgtgaaaagatcccaagatggagaggaagaaacgctaattcagcatgtgttcattctgcattgagaaggaactgatacatctgatgcatgctttgagaccagaagaaaagacttacctgaataattactacattagggaagctactgtctacgttaagataaagggtattgccttggctctatttggcatggatggagcccagttggaaaattcccaaatattacaacaagtccttgaacccaggccatgtggttagacgttggtgttaaggttagaccttatgttagagtcatttctgatgttccagcttctagccatgtagtgctctcagtcttcataccccagaaattattggtatatttgtagataccgagaatgatccctcagtctgagaggttagaatgatcatctgtaatctgagggttaatttctaggcaggtggagagagtggtaaaaaagaaatgaaattgacaagctaggaaagaggaggcagaaagatttggaaaattcacagagtttcacccttaagctgtagagagtgggtcacatttgttagccacggaaacatagaaacatacacaaggccagaaaaagaagaaggagctcaactaaaagtggcatagagaatacacatataaaaacaatatatttgtcatatgctcctagagaggagaaaggggtgattgaaagaaaaaaaaatacttaaatatttgtaattgtgaggggtttcttttggaaataattacttttgaaccatgtatgtggtatgtatattttcagtgggttaattataccccatgatacctattaaaggaaaaccagtgggtctggtggtgctggtcttttcctccccattcctacaatttctatgtggcccaagtcattcctaatcttggtctctatagcagtgttctctctgaatgctgagctgaagaaattatacgtacatacacacatacatacatacatacaaatatatgtatatatattctcagctgctgcgggaggtaggtaccatggccattcagcacagccttgatttcctcccaaagtaggtgagctatagtgaagaataggtgcaaacaaacaagcttacttccattgcaaaatagaagaagaggaagttagagataattctgatcaatcattttggaggctttgttataaggcaacccccggtatatcatggaatttccattgacatttgaatttggacttggatcttcccttggtcccattagctgaggtttagtaatctaaagtccctatagtatatgattataatgctattttaaaaaatatatatataaaatatttttttctttttaaaatagacactatagttttacccataagtaatatttaaagattatagctcccaaaagaatggaccaaccactttcgtatcataatttctttttggtaaatatgagactattatgaaatcatagtatatgattgtatttaaaggtacaatcaaaggatcttttgtccattccattaataactgaataaaaaataaataaaatggatagaaaaaaactaaagttgaaaatacattcttaaactagttgtctgaaatgagaaaagagtgagaactaggtgtgcaagaaccaaacgtattttattttattttttaaatgggagcaacatatcagtcgtgtcaccagctggtatattgtgtaaatattaaagctccattgggactgatttttcatggcaacatcagctttctaatgttctaaattctataaaaaccacccacaaagaaacaaagcaaatttcattatctaatgagttgctggaaaatcatattgagaataattatttcagattcctcagttgttaacttctacattcaagggcttatctctgcccccattgatttttaacctcaaaatggtgtgagatttactgtggaaccctaaagcagtaaaataaaaaacctggttgcagcacattcacactgttgtccttaaaattccccttttttctctatgtacgataaagtaacagtatgtcagataagccggtggggggatgagattaggctgaggcagtgctagtcaactgggggaaaaggatgatggaaaaatcacccagttgtgctatatttttaaagaaggaggtcgtttatgtgtgcagacaattctccctgaggttagcccaatggagaaatgaagcagaggaaggaaacatagaaagacatgggctatcagggaggaagatgttcaatagaacatgcaagaatttctggaagaaaggctgtggaagggccaatggagaaaatgaatggacaaagctcaggaatccctacgctatgtagaatgttcttggtgttatcagggttaagccctgtaattatgtaacctatttatcgcaacatgaatttttatgatttcttgtgatgtattcttttatgaaattaacaagaactcattattttgaggtagaggaaaatcaatgctttatctgatatgctgagaaattattagattgccaatactcatgtgcgtttcatgtgttttataaggtttgttcctttgaagaattgtagttcttagtcccacagggaaatgtgtatctatttatatatcatagtataaatctatgatatatttatatcatatataaaagtctgagttctctttcttagtccctaatcatgtttctcccataggctgtgtttacatggagctatcggtttagccttttaagcttcattagcttgtctattattgaaatagtttccaagaaattttagatattatcataacatctgggtctactcaaacacttattgtttgaaagacttatgtcttggacctatcaaaaactgactttatttattgcttagtgaaaatactagtgggatcaacaatgattttcttgaatgggcatgaatggagatgcccgcacagtaatgtagaaatgtttcatacagctattaaaatgtaactgacctccttagaggcagattagtaactgttcctactttgtatagctaagtgacagtcacttaacttacatgactttcttttttcacattgggtctctggtcctgtgtcttcacctcatttatagcacgtctccttgatttttggtagtatcaacttcccagtgatctgttcagttaagttcttctcccgttaaccaggaagtgcttattctctcatcacagtgggaagaatagcctattgtctttcattttgcctgagtgtattttactatttgggctctgaaataaaaattatgaaatatggtgaggtcacatgttggtgctgccttgctgcataaaattctaggagggcaggttaggagacagttatgtatggcctttcgggaaaattcaaagggtgggattacaagggtgttcctcaggcatgcccctatgggccctatgtggaagcaagaagaattgactgatttacaggacttctctttatgtcaatcttaagaggatggatgaatctggacatttgttccacccgacctctgactgatggtttggaaaataactttaattaggatcatatgaccattgaaaaaggaaaaatgtagactctgacttccgtcccactgaaggattaatgaaaacctttactagcatttagagcttttcagaacatccccactgtcatgtgtctcagcagtggagactgcaagtaaggcttttaattttaggaggtttttttttttttttttttttcccctaaatggtatggccaaaagtcagagttaaaatatatatagttagattccaacttcctccttcactctaaaaatagaatccaaacccactcttcatatatgcttccagaatggggcttaagtaccaatctctgctttgcaatgggcacaatcttggtcatgtcctgaggctctctaagaaaagagaggatctaggatgggagagctagaaagttgctaactgggaagaacaaggccctgaggggttggtctaccaatctgggaagatttgaaaacaaacttctcgcaactgaaggaaggctgaaggctgctgcaagtcattgagtgactttaggatgagcaaaacattgggccacttcctaatgccctatgtgtatagtaccagaagcaaggtctcagacttaacagacccagctctgttccaaggtgagtctgaaccaatagaaagcaaacatgtgcagatatccaaacaagactgctcatgcaagtcggggctggctacccgtcttaggcagcaacagcagagctccagggagcttattcaatatttactgagacttcgaagacccagcagatgtttaatgaagtcactattttggctcaaaccctccacttctccccctcccctcaaaaagccaacaggtaaacacataaatgaaagaaacccacagaaggggatgggaaataaagaaaattctctcaagacttctccaggcccatgtcactggtcagcgtggtttttatgtgtattaggattgggggatgtgaagaaataagtatccagtactttataaccaaagcaattaaatgatattggggtagggaatgttggccagttttgtttagttttgccatcacattgtcacccagacctcacctagccccaagtaatcgggcgccccgaagagggagacagagatgtgccagagttgacccagtgtgcggatgataactactgacgaaagagtcatcgacctcagttagtggttggatgtagtcacattagtttgcctctccccatctttgtctccctggcaaggagaatatgcgggacatgatgctaagagccctgggtaaatgtggtgagaatgcacgcgtgcatatgctacacatatgtgcttctcagttgcagaaaatgaactgctttgggagattatcagtagaaagagtgttatcatattggtgctgagtgctatgtgtgcttatacaatttgttcttgtattttaataaactttgaataaaagaataaaaaaaaaaaaaaaaaaaaaaa

SEQ ID NO: 132 - protein, 273 aa, human organism
  misc_feature (133)..(133): Xaa can be any naturally occurring amino acid
  misc_feature (266)..(266): Xaa can be any naturally occurring amino acid
MGILSVDLLITLQILPVFFSNCLFLALYDSVILLKHVVLLLSRSKSTRGEWRRMLTSEGLRCVWKSFLLDAYKQVKLGEDAPNSSVVHVSSTEGGDNSGNGTQEKIAEGATCHLLDFASPERPLVVNFGSATXPPFTSQLPAFRKLVEEFSSVADFLLVYIDEAHPSDGWAIPGDSSLSFEVKKHQNQEDRCAAAQQLLERFSLPPQCRVVADRMDNNANIAYGVAFERVCIVQRQKIAYLGGKGPFSYNLQEVRHWLEKNFSKRXKKTRLAG

SEQ ID NO: 133 - DNA, 2685 bp, human organism
caggcgtgtcccagggggagccccgctctgcagccctgtgcgccgtagagagctggacttaggctggcagcatggccgagttcagggtcagggtgtccaccggagaagccttcggggctggcacatgggacaaagtgtctgtcagcatcgtggggacccggggagagagccccccactgcccctggacaatctcggcaaggagttcactgcgggcgctgaggaggacttccaggtgacgctcccggaggacgtaggccgagtgctgctgctgcgcgtgcacaaggcgcccccagtgctgcccctgctggggcccctggccccggatgcctggttctgccgctggttccagctgacaccgccgcggggcggccacctcctcttcccctgctaccagtggctggagggggcggggaccctggtgctgcaggagggtacagccaaggtgtcctgggcagaccaccaccctgtgctccagcaacagcgccaggaggagcttcaggcccggcaggagatgtaccagtggaaggcttacaacccaggttggcctcactgcctggatgaaaagacagtggaagacttggagctcaatatcaaatactccacagccaagaatgccaacttttatctacaagctggctctgcttttgcagagatgaaaatcaaggggttgctggaccgcaaggggctctggaggagtctgaatgagatgaaaaggatcttcaacttccggaggaccccagcagctgagcacgcatttgagcactggcaggaggatgccttcttcgcctcccagttcctgaatggtctcaaccctgtcctgatccgccgctgtcactacctcccaaagaacttccccgtcactgatgccatggtggcctcattgttgggtcctgggaccagcttgcaggctgagctagagaagggctccctgttcttggtggatcacggcatcctctctggcatccagaccaatgtcattaatgggaagccgcagttctctgcggccccaatgaccctgctataccagagcccaggctgcgggccgctgctgcctctcgccatccagctcagccagacccccggcccaaacagccccatcttcctgcccactgatgacaagtgggactggttgctggccaagacctgggtgcgcaatgccgagttctccttccatgaggccctcacgcacctgctgcactcacatctgctgcctgaggtcttcaccctggctaccctgcgtcagctgccccactgccaccctctcttcaagctgctgatcccgcacacccgatacaccctgcacatcaacacactcgcccgggagctgcttatcgtgccagggcaggtggtggacaggtccacaggcatcggcattgaaggcttctctgagttgatacagaggaacatgaagcagctgaactattctctcctgtgtctgcctgaggatatccggacccgaggagttgaagacatcccaggctactactaccgtgatgatgggatgcagatttggggtgcagtggaacgctttgtctctgaaatcatcggtatctactacccaagtgatgagtctgtccaagatgacagagagctccaggcctgggtcagagagatcttctccaagggcttcctaaaccaggagagctcaggtatcccttcctcactggagacccgggaagccctggtgcagtatgtcaccatggtgatattcacctgctcagccaagcatgcggctgtcagtgcagggcagtttgactcctgtgcttggatgcccaacctgccacccagcatgcagctgccaccacccacctccaaaggcctggcaacatgcgagggcttcatagccaccctcccacctgtcaatgccacatgtgatgtcatccttgctctctggttgctgagcaaggagcctggagaccaaaggcccctgggcacctatccggatgagcacttcacagaggaggcccctcggcggagcatcgccaccttccagagccgcctggcccagatctcgaggggcatccaggagcggaaccggggcctggtgctgccctacacctacctagaccctcccctcatcgagaacagcgtctccatctaaatcccaggggaacacaggcccagatgacatccctttgaccacatcgctctaggataactggcacccagagaaaaggactcctcagaaaaaacaggcccccatgtgcctctcctgggacaaccagactctgtaactcacccccaccaccatacacacacacaaaaacagaaacaaaatcaaaacagagaaagcagaaaatctaccaagaacagagtctcaggacagaaccactgagtcttttggaggctccaagcctcaaagtgcccgcagagcccaccttgagggttttgctagttggttttgttttgcgtttacagccgtggggggaagcacataatcccgccccagggcccactagcatccactgattggaccttatggtcacccaactcaaggacagccaccaagaagtggctgccaaagagactgggcgcagtggctcatgcccataatcccagcactttgggagatggaggcgggaaaatcatttgaggtcagaagttcaaggccagcctggacgacatagcgagactccacctctaccaaaaaataaaaattaaaaaacaaaaaaaaaaaaaaaaaa

SEQ ID NO: 134 - protein, 676 aa, human organism
MAEFRVRVSTGEAFGAGTWDKVSVSIVGTRGESPPLPLDNLGKEFTAGAEEDFQVTLPEDVGRVLLLRVHKAPPVLPLLGPLAPDAWFCRWFQLTPPRGGHLLFPCYQWLEGAGTLVLQEGTAKVSWADHHPVLQQQRQEELQARQEMYQWKAYNPGWPHCLDEKTVEDLELNIKYSTAKNANFYLQAGSAFAEMKIKGLLDRKGLWRSLNEMKRIFNFRRTPAAEHAFEHWQEDAFFASQFLNGLNPVLIRRCHYLPKNFPVTDAMVASLLGPGTSLQAELEKGSLFLVDHGILSGIQTNVINGKPQFSAAPMTLLYQSPGCGPLLPLAIQLSQTPGPNSPIFLPTDDKWDWLLAKTWVRNAEFSFHEALTHLLHSHLLPEVFTLATLRQLPHCHPLFKLLIPHTRYTLHINTLARELLIVPGQVVDRSTGIGIEGFSELIQRNMKQLNYSLLCLPEDIRTRGVEDIPGYYYRDDGMQIWGAVERFVSEIIGIYYPSDESVQDDRELQAWVREIFSKGFLNQESSGIPSSLETREALVQYVTMVIFTCSAKHAAVSAGQFDSCAWMPNLPPSMQLPPPTSKGLATCEGFIATLPPVNATCDVILALWLLSKEPGDQRPLGTYPDEHFTEEAPRRSIATFQSRLAQISRGIQERNRGLVLPYTYLDPPLIENSVSI

SEQ ID NO: 135 - DNA, 3742 bp, human organism
gaattccttctctcctcctcctcgcccttctcctcgccctcctcctcctcctcgccctcccctcccgatcctcatccccttgccctcccccagcccagggacttttccggaaagtttttattttccgtctgggctctcggagaaagaagctcctggctcagcggctgcaaaactttcctgctgccgcgccgccagcccccgccctccgctgcccggccctgcgccccgccgagcgatgagcgcccctccggtcctgcggccgcccagtccgctgctgcccgtggcggcggcagctgccgcagcggccgccgcactggtcccagggtccgggcccgggcccgcgccgttcttggctcctgtcgcggccccggtcgggggcatctcgttccatctgcagatcggcctgagccgtgagccggtgctgctgctgcaggactcgtccggggactacagcctggcgcacgtccgcgagatggcttgctccattgtcgaccagaagttccctgaatgtggtttctacggaatgtatgataagatcctgctttttcgccatgaccctacctctgaaaacatccttcagctggtgaaagcggccagtgatatccaggaaggcgatcttattgaagtggtcttgtcacgttccgccacctttgaagactttcagattcgtccccacgctctctttgttcattcatacagagctccagctttctgtgatcactgtggagaaatgctgtgggggctggtacgtcaaggtcttaaatgtgaagggtgtggtctgaattaccataagagatgtgcatttaaaatacccaacaattgcagcggtgtgaggcggagaaggctctcaaacgtttccctcactggggtcagcaccatccgcacatcatctgctgaactctctacaagtgcccctgatgagccccttctgcaaaaatcaccatcagagtcgtttattggtcgagagaagaggtcaaattctcaatcatacattggacgaccaattcaccttgacaagattttgatgtctaaagttaaagtgccgcacacatttgtcatccactcctacacccggcccacagtgtgccagtactgcaagaagcttctgaaggggcttttcaggcagggcttgcagtgcaaagattgcagattcaactgccataaacgttgtgcaccgaaagtaccaaacaactgccttggcgaagtgaccattaatggagatttgcttagccctggggcagagtctgatgtggtcatggaagaagggagtgatgacaatgatagtgaaaggaacagtgggctcatggatgatatggaagaagcaatggtccaagatgcagagatggcaatggcagagtgccagaacgacagtggcgagatgcaagatccagacccagaccacgaggacgccaacagaaccatcagtccatcaacaagcaacaatatcccactcatgagggtagtgcagtctgtcaaacacacgaagaggaaaagcagcacagtcatgaaagaaggatggatggtccactacaccagcaaggacacgctgcggaaacggcactattggagattggatagcaaatgtattaccctctttcagaatgacacaggaagcaggtactacaaggaaattcctttatctgaaattttgtctctggaaccagtaaaaacttcagctttaattcctaatggggccaatcctcattgtttcgaaatcactacggcaaatgtagtgtattatgtgggagaaaatgtggtcaatccttccagcccatcaccaaataacagtgttctcaccagtggcgttggtgcagatgtggccaggatgtgggagatagccatccagcatgcccttatgcccgtcattcccaagggctcctccgtgggtacaggaaccaacttgcacagagatatctctgtgagtatttcagtatcaaattgccagattcaagaaaatgtggacatcagcacagtatatcagatttttcctgatgaagtactgggttctggacagtttggaattgtttatggaggaaaacatcgtaaaacaggaagagatgtagctattaaaatcattgacaaattacgatttccaacaaaacaagaaagccagcttcgtaatgaggttgcaattctacagaaccttcatcaccctggtgttgtaaatttggagtgtatgtttgagacgcctgaaagagtgtttgttgttatggaaaaactccatggagacatgctggaaatgatcttgtcaagtgaaaagggcaggttgccagagcacataacgaagtttttaattactcagatactcgtggctttgcggcaccttcattttaaaaatatcgttcactgtgacctcaaaccagaaaatgtgttgctagcctcagctgatccttttcctcaggtgaaactttgtgattttggttttgcccggatcattggagagaagtctttccggaggtcagtggtgggtacccccgcttacctggctcctgaggtcctaaggaacaagggctacaatcgctctctagacatgtggtctgttggggtcatcatctatgtaagcctaagcggcacattcccatttaatgaagatgaagacatacacgaccaaattcagaatgcagctttcatgtatccaccaaatccctggaaggaaatatctcatgaagccattgatcttatcaacaatttgctgcaagtaaaaatgagaaagcgctacagtgtggataagaccttgagccacccttggctacaggactatcagacctggttagatttgcgagagctggaatgcaaaatcggggagcgctacatcacccatgaaagtgatgacctgaggtgggagaagtatgcaggcgagcagcggctgcagtaccccacacacctgatcaatccaagtgctagccacagtgacactcctgagactgaagaaacagaaatgaaagccctcggtgagcgtgtcagcatcctctgagttccatctcctataatctgtcaaaacactgtggaactaataaatacatacggtcaggtttaacatttgccttgcagaactgccattattttctgtcagatgagaacaaagctgttaaactgttagcactgttgatgtatctgagttgccaagacaaatcaacagaagcatttgtattttgtgtgaccaactgtgttgtattaacaaaagttccctgaaacacgaaacttgttattgtgaatgattcatgttatatttaatgcattaaacctgtctccactgtgcctttgcaaatcagtgtttttcttactggagcttcattttggtaagagacagaatgtatctgtgaagtagttctgtttggtgtgtcccattggtgttgtcattgtaaacaaactcttgaagagtcgattatttccagtgttctatgaacaactccaaaacccatgtgggaaaaaaatgaatgaggagggtagggaataaaatcctaagacacaaatgcatgaacaagttttaatgtatagttttgaatcctttgcctgcctggtgtgcctcagtatatttaaactcaagacaatgcacctagctgtgcaagacctagtgctcttaagcctaaatgccttagaaatgtaaactgccatatataacagatacatttccctctttcttataatactctgttgtactatggaaaatcagctgctcagcaacctttcacctttgtgtatttttcaataataaaaaatattcttgtcaaaaaaaaaaaaa

SEQ ID NO: 136 - protein, 912 aa, human organism
MSAPPVLRPPSPLLPVAAAAAAAAAALVPGSGPGPAPFLAPVAAPVGGISFHLQIGLSREPVLLLQDSSGDYSLAHVREMACSIVDQKFPECGFYGMYDKILLFRHDPTSENILQLVKAASDIQEGDLIEVVLSRSATFEDFQIRPHALFVHSYRAPAFCDHCGEMLWGLVRQGLKCEGCGLNYHKRCAFKIPNNCSGVRRRRLSNVSLTGVSTIRTSSAELSTSAPDEPLLQKSPSESFIGREKRSNSQSYIGRPIHLDKILMSKVKVPHTFVIHSYTRPTVCQYCKKLLKGLFRQGLQCKDCRFNCHKRCAPKVPNNCLGEVTINGDLLSPGAESDVVMEEGSDDNDSERNSGLMDDMEEAMVQDAEMAMAECQNDSGEMQDPDPDHEDANRTISPSTSNNIPLMRVVQSVKHTKRKSSTVMKEGWMVHYTSKDTLRKRHYWRLDSKCITLFQNDTGSRYYKEIPLSEILSLEPVKTSALIPNGANPHCFEITTANVVYYVGENVVNPSSPSPNNSVLTSGVGADVARMWEIAIQHALMPVIPKGSSVGTGTNLHRDISVSISVSNCQIQENVDISTVYQIFPDEVLGSGQFGIVYGGKHRKTGRDVAIKIIDKLRFPTKQESQLRNEVAILQNLHHPGVVNLECMFETPERVFVVMEKLHGDMLEMILSSEKGRLPEHITKFLITQILVALRHLHFKNIVHCDLKPENVLLASADPFPQVKLCDFGFARIIGEKSFRRSVVGTPAYLAPEVLRNKGYNRSLDMWSVGVIIYVSLSGTFPFNEDEDIHDQIQNAAFMYPPNPWKEISHEAIDLINNLLQVKMRKRYSVDKTLSHPWLQDYQTWLDLRELECKIGERYITHESDDLRWEKYAGEQRLQYPTHLINPSASHSDTPETEETEMKALGERVSIL

SEQ ID NO: 137 - DNA, 3903 bp, human organism
aatggtcagtcaatacattataacataatacaccaaatgctagaatagaaggggaggggggcacacataatgactcactgctggaagaagggtgcatcagtgaattaaaaaatgtccctcccctcttcagcactcagcgcgcagctatttccttctgccagtctctttgaactctggatctttgcttttgctcgctgctctcctgtttttcattctccacattttctcaatcctctttctttatccttagccaccctgcttttttcctccttttttaaaaaatcggagatttcgtcttaaaatgatttgtcttccttaccttcgtccatttcaacactgaaggctgcaaagaacttcacctttcccctagtggtatttaaaaattctcaatccgtaaaaagtctttttgaaaggcaaaggaacaggacccagaccctctcgacacccttgatccgagtcagatctgcactagcaaccagaactaatatttcatttaacccaccaaaagggggaggcgagaggagccagaagcaaacttcatctgtctcagacggatccgtggttcctacatttggaggagccgcgtgtcagaaggcgtaggaccccaaggggggacaaggaggactcccgagtctcccttctccgctctccgagaccgaagaggtggactgagccgctcgggacagcggcaccggaggaggctcggagaagatgcggggctcggggccccggggtgcgggacaccggcggcccccaagcggcggcggcgacacccccatcaccccagcgtccctggccggctgctactctgcacctcgacgggctcccctctggacgtgccttctcctgtgcgccgcactccggaccctcctggccagccccagcaacgaagtgaatttattggattcacgcactgtcatgggggacctgggatggattgcttttccaaaaaatgggtgggaagagattggtgaagtggatgaaaattatgcccctatccacacataccaagtatgcaaagtgatggaacagaatcagaataactggcttttgaccagttggatctccaatgaaggtgcttccagaatcttcatagaactcaaatttaccctgcgggactgcaacagccttcctggaggactggggacctgtaaggaaacctttaatatgtattactttgagtcagatgatcagaatgggagaaacatcaaggaaaaccaatacatcaaaattgataccattgctgccgatgaaagctttacagaacttgatcttggtgaccgtgttatgaaactgaatacagaggtcagagatgtaggacctctaagcaaaaagggattttatcttgcttttcaagatgttggtgcttgcattgctctggtttctgtgcgtgtatactataaaaaatgcccttctgtggtacgacacttggctgtcttccctgacaccatcactggagctgattcttcccaattgctcgaagtgtcaggctcctgtgtcaaccattctgtgaccgatgaacctcccaaaatgcactgcagcgccgaaggggagtggctggtgcccatcgggaaatgcatgtgcaaggcaggatatgaagagaaaaatggcacctgtcaagtgtgcagacctgggttcttcaaagcctcacctcacatccagagctgcggcaaatgtccacctcacagttatacccatgaggaagcttcaacctcttgtgtctgtgaaaaggattatttcaggagagagtctgatccacccacaatggcatgcacaagacccccctctgctcctcggaatgccatctcaaatgttaatgaaactagtgtctttctggaatggattccgcctgctgacactggtggaaggaaagacgtgtcatattatattgcatgcaagaagtgcaactcccatgcaggtgtgtgtgaggagtgtggcggtcatgtcaggtaccttccccggcaaagcggcctgaaaaacacctctgtcatgatggtggatctactcgctcacacaaactatacctttgagattgaggcagtgaatggagtgtccgacttgagcccaggagcccggcagtatgtgtctgtaaatgtaaccacaaatcaagcagctccatctccagtcaccaatgtgaaaaaagggaaaattgcaaaaaacagcatctctttgtcttggcaagaaccagatcgtcccaatggaatcatcctagagtatgaaatcaagcattttgaaaaggaccaagagaccagctacacgattatcaaatctaaagagacaactattactgcagagggcttgaaaccagcttcagtttatgtcttccaaattcgagcacgtacagcagcaggctatggtgtcttcagtcgaagatttgagtttgaaaccaccccagtgtttgcagcatccagcgatcaaagccagattcctgtaattgctgtgtctgtgacagtaggagtcattttgttggcagtggttatcggcgtcctcctcagtggaagttgctgcgaatgtggctgtgggagggcttcttccctgtgcgctgttgcccatccaatcctaatatggcggtgtggctacagcaaagcaaaacaagatccagaagaggaaaagatgcattttcataatgggcacattaaactgccaggagtaagaacttacattgatccacatacctatgaggatcccaatcaagctgtccacgaatttgccaaggagatagaagcatcatgtatcaccattgagagagttattggagcaggtgaatttggtgaagtttgtagtggacgtttgaaactaccaggaaaaagagaattacctgtggctatcaaaacccttaaagtaggctatactgaaaagcaacgcagagatttcctaggtgaagcaagtatcatgggacagtttgatcatcctaacatcatccatttagaaggtgtggtgaccaaaagtaaaccagtgatgatcgtgacagagtatatggagaatggctctttagatacatttttgaagaaaaacgatgggcagttcactgtgattcagcttgttggcatgctgagaggtatctctgcaggaatgaagtacctttctgacatgggctatgtgcatagagatcttgctgccagaaacatcttaatcaacagtaaccttgtgtgcaaagtgtctgactttggactttcccgggtactggaagatgatcccgaggcagcctacaccacaaggggaggaaaaattccaatcagatggactgccccagaagcaatagctttccgaaagtttacttctgccagtgatgtctggagttatggaatagtaatgtgggaagttgtgtcttatggagagagaccctactgggagatgaccaatcaagatgtgattaaagcggtagaggaaggctatcgtctgccaagccccatggattgtcctgctgctctctatcagttaatgctggattgctggcagaaagagcgaaatagcaggcccaagtttgatgaaatagtcaacatgttggacaagctgatacgtaacccaagtagtctgaagacgctggttaatgcatcctgcagagtatctaatttattggcagaacatagcccactaggatctggggcctacagatcagtaggtgaatggctagaggcaatcaagatgggccggtatacagagattttcatggaaaatggatacagttcaatggacgctgtggctcaggtgaccttggaggatttgagacggcttggagtgactcttgtcggtcaccagaagaagatcatgaacagccttcaagaaatgaaggtgcagctggtaaacggaatggtgccattgtaacttcatgtaaatgtcgcttcttcaagtgaatgattctgcactttgtaaacagcactgagatttattttaacaaaaaaa

SEQ ID NO: 138 - protein, 1037 aa, human organism
MRGSGPRGAGHRRPPSGGGDTPITPASLAGCYSAPRRAPLWTCLLLCAALRTLLASPSNEVNLLDSRTVMGDLGWIAFPKNGWEEIGEVDENYAPIHTYQVCKVMEQNQNNWLLTSWISNEGASRIFIELKFTLRDCNSLPGGLGTCKETFNMYYFESDDQNGRNIKENQYIKIDTIAADESFTELDLGDRVMKLNTEVRDVGPLSKKGFYLAFQDVGACIALVSVRVYYKKCPSVVRHLAVFPDTITGADSSQLLEVSGSCVNHSVTDEPPKMHCSAEGEWLVPIGKCMCKAGYEEKNGTCQVCRPGFFKASPHIQSCGKCPPHSYTHEEASTSCVCEKDYFRRESDPPTMACTRPPSAPRNAISNVNETSVFLEWIPPADTGGRKDVSYYIACKKCNSHAGVCEECGGHVRYLPRQSGLKNTSVMMVDLLAHTNYTFEIEAVNGVSDLSPGARQYVSVNVTTNQAAPSPVTNVKKGKIAKNSISLSWQEPDRPNGIILEYEIKHFEKDQETSYTIIKSKETTITAEGLKPASVYVFQIRARTAAGYGVFSRRFEFETTPVFAASSDQSQIPVIAVSVTVGVILLAVVIGVLLSGSCCECGCGRASSLCAVAHPILIWRCGYSKAKQDPEEEKMHFHNGHIKLPGVRTYIDPHTYEDPNQAVHEFAKEIEASCITIERVIGAGEFGEVCSGRLKLPGKRELPVAIKTLKVGYTEKQRRDFLGEASIMGQFDHPNIIHLEGVVTKSKPVMIVTEYMENGSLDTFLKKNDGQFTVIQLVGMLRGISAGMKYLSDMGYVHRDLAARNILINSNLVCKVSDFGLSRVLEDDPEAAYTTRGGKIPIRWTAPEAIAFRKFTSASDVWSYGIVMWEVVSYGERPYWEMTNQDVIKAVEEGYRLPSPMDCPAALYQLMLDCWQKERNSRPKFDEIVNMLDKLIRNPSSLKTLVNASCRVSNLLAEHSPLGSGAYRSVGEWLEAIKMGRYTEIFMENGYSSMDAVAQVTLEDLRRLGVTLVGHQKKIMNSLQEMKVQLVNGMVPL

SEQ ID NO: 139 - DNA, 1282 bp, human organism
ctgcgatcccgcagggcagcgacgcgactctggtgcgggccgtcttcttccccccgagctgggcgtgcgcggccgcaatgaactgggagctgctgctgtggctgctggtgctgtgcgcgctgctcctgctcttggtgcagctgctgcgcttcctgagggctgacggcgacctgacgctactatgggccgagtggcagggacgacgcccagaatgggagctgactgatatggtggtgtgggtgactggagcctcgagtggaattggtgaggagctggcttaccagttgtctaaactaggagtttctcttgtgctgtcagccagaagagtgcatgagctggaaagggtgaaaagaagatgcctagagaatggcaatttaaaagaaaaagatatacttgttttgccccttgacctgaccgacactggttcccatgaagcggctaccaaagctgttctccaggagtttggtagaatcgacattctggtcaacaatggtggaatgtcccagcgttctctgtgcatggataccagcttggatgtctacagaaagctaatagagcttaactacttagggacggtgtccttgacaaaatgtgttctgcctcacatgatcgagaggaagcaaggaaagattgttactgtgaatagcatcctgggtatcatatctgtacctctttccattggatactgtgctagcaagcatgctctccggggtttttttaatggccttcgaacagaacttgccacatacccaggtataatagtttctaacatttgcccaggacctgtgcaatcaaatattgtggagaattccctagctggagaagtcacaaagactataggcaataatggagaccagtcccacaagatgacaaccagtcgttgtgtgcggctgatgttaatcagcatggccaatgatttgaaagaagtttggatctcagaacaacctttcttgttagtaacatatttgtggcaatacatgccaacctgggcctggtggataaccaacaagatggggaagaaaaggattgagaactttaagagtggtgtggatgcagactcttcttattttaaaatctttaagacaaaacatgactgaaaagagcacctgtacttttcaagccactggagggagaaatggaaaacatgaaaacagcaatcttcttatgcttctgaataatcaaagactaatttgtgattttactttttaatagatatgactttgcttccaacatggaatgaaataaaaaataaataataaaagattgccatgaatcttgcaaa

SEQ ID NO: 140 - protein, 339 aa, human organism; identical to SEQ ID NO: 32

SEQ ID NO: 141 - DNA, 1740 bp, human organism
atgagcagctgcaggtacaacgggggcgtcatgcggccgctcagcaacttgagcgcgtcccgccggaacctgcacgagatggactcagaggcgcagcccctgcagccccccgcgtctgtcggaggaggtggcggcgcgtcctccccgtctgcagccgctgccgccgccgccgctgtttcgtcctcagcccccgagatcgtggtgtctaagcccgagcacaacaactccaacaacctggcgctctatggaaccggcggcggaggcagcactggaggaggcggcggcggtggcgggagcgggcacggcagcagcagtggcaccaagtccagcaaaaagaaaaaccagaacatcggctacaagctgggccaccggcgcgccctgttcgaaaagcgcaagcggctcagcgactacgcgctcatcttcggcatgttcggcatcgtggtcatggtcatcgagaccgagctgtcgtggggcgcctacgacaaggcgtcgctgtattccttagctctgaaatgccttatcagtctctccacgatcatcctgctcggtctgatcatcgtgtaccacgccagggaaatacagttgttcatggtggacaatggagcagatgactggagaatagccatgacttatgagcgtattttcttcatctgcttggaaatactggtgtgtgctattcatcccatacctgggaattatacattcacatggacggcccggcttgccttctcctatgccccatccacaaccaccgctgatgtggatattattttatctataccaatgttcttaagactctatctgattgccagagtcatgcttttacatagcaaacttttcactgatgcctcctctagaagcattggagcacttaataagataaacttcaatacacgttttgttatgaagactttaatgactatatgcccaggaactgtactcttggtttttagtatctcattatggataattgccgcatggactgtccgagcttgtgaaaggtaccatgatcaacaggatgttactagcaacttccttggagcgatgtggttgatatcaataacttttctctccattggttatggtgacatggtacctaacacatactgtggaaaaggagtctgcttacttactggaattatgggtgctggttgcacagccctggtggtagctgtagtggcaaggaagctagaacttaccaaagcagaaaaacacgtgcacaatttcatgatggatactcagctgactaaaagagtaaaaaatgcagctgccaatgtactcagggaaacatggctaatttacaaaaatacaaagctagtgaaaaagatagatcatgcaaaagtaagaaaacatcaacgaaaattcctgcaagctattcatcaattaagaagtgtaaaaatggagcagaggaaactgaatgaccaagcaaacactttggtggacttggcaaagacccagaacatcatgtatgatatgatttctgacttaaacgaaaggagtgaagacttcgagaagaggattgttaccctggaaacaaaactagagactttgattggtagcatccacgccctccctgggctcataagccagaccatcaggcagcagcagagagatttcattgaggctcagatggagagctacgacaagcacgtcacttacaatgctgagcggtcccggtcctcgtccaggaggcggcggtcctcttccacagcaccaccaacttcatcagagagtagctag

SEQ ID NO: 142 - protein, 579 aa, human organism
MSSCRYNGGVMRPLSNLSASRRNLHEMDSEAQPLQPPASVGGGGGASSPSAAAAAAAAVSSSAPEIVVSKPEHNNSNNLALYGTGGGGSTGGGGGGGGSGHGSSSGTKSSKKKNQNIGYKLGHRRALFEKRKRLSDYALIFGMFGIVVMVIETELSWGAYDKASLYSLALKCLISLSTIILLGLIIVYHAREIQLFMVDNGADDWRIAMTYERIFFICLEILVCAIHPIPGNYTFTWTARLAFSYAPSTTTADVDIILSIPMFLRLYLIARVMLLHSKLFTDASSRSIGALNKINFNTRFVMKTLMTICPGTVLLVFSISLWIIAAWTVRACERYHDQQDVTSNFLGAMWLISITFLSIGYGDMVPNTYCGKGVCLLTGIMGAGCTALVVAVVARKLELTKAEKHVHNFMMDTQLTKRVKNAAANVLRETWLIYKNTKLVKKIDHAKVRKHQRKFLQAIHQLRSVKMEQRKLNDQANTLVDLAKTQNIMYDMISDLNERSEDFEKRIVTLETKLETLIGSIHALPGLISQTIRQQQRDFIEAQMESYDKHVTYNAERSRSSSRRRRSSSTAPPTSSESS

SEQ ID NO: 143 - DNA, 1896 bp, human organism
atgcgcgccgtgccgctgcccgccccgctcctgccgctgctgctgctcgcgctcctggccgctcccgccgcccgcgccagcagagccgagtccgtctccgcgccgtggcccgaacccgagcgcgagtcgcggccaccgcccggcccggggcccgggaacaccacccggtttgggtctggggcggcgggcggcagcggcagctccagctccaacagcagtggcgacgccttggtgacccgcatttccatcctcctccgcgacctacccaccctcaaggcagccgtgatcgtggcgttcgcctttaccaccctcctcatcgcctgcctgctgctgcgcgtcttcaggtcgggaaagaggttaaagaagacacgcaagtatgatatcatcaccactccagcagagcgagtggaaatggcgccactaaatgaagaggatgatgaagatgaggactccacagtattcgacatcaaatacagagtgtccttgccggctgcactgagacgtcagctgccagggtgccagacgctactgacagttcctgtgcccccacccttcatcctcgacattgaccttccagcaagatgcagtggaaggcctgatggtggaatcagacctggtaaaacctgtttcccagcctggtggcatcctgtggaaagttggtcagctgcaacctggggtgtgaaggactggacctggaagccctcttgcgtcggaggtgttgaaaccaaaacgaacgttatgtataaaaccccagctccatcgtgcgtgtcaggcatctgctcagactgtcactggcaagctcgtttccacgtcaccacaatggagttgcttctgccaccctttgggcatccctttaaagtgccccctacttctactccccatggttttcgacaactgcagctgaatctcatggaaaagctggattcctctgccttacgcagaaacacccgggctccatctgccaggtgcttgccactggtcctggcagaaatggcggctgctgaaagtgaccttccaaatccttggtggcacttcagcgccacaggctctccaataaaaaccctttacacacaaaccatgagtaccttgggcttggatgttttctgtggtgccggccagcggggcaccttttgtgaagacagagcagtgactaaggttctccagggtagctctttctccaaacagctgcgctggaagccagccctagagagtgggtttccccatcatctcaggcttctcagagagtgtcctccgctgagcacccatcctgtcaggttggctcgttcagatgcccggggacaagccagcctgacggggaggagggtgtttcggcgtccgcggcagtctctgcatggcggagggtcagcgggtaccgcaacttgccttttggttttgaagattctgttgaggcgccatcctcaccttgacctcttctacaaaatctgtctcccctgctgtgccgtggaacacctacgggaagccaagagaagctcagtgactgtccttgcgtcatttgagcagagcccacaaaaggcagctgctgcccacggggagcctgtcaaacgagggcccagtgggcaattgaccagacacacatgccctggctgggggatcacacatgcgaacctgcagacaattccagatacccaaggccaggaaggcccacgtgaggatgtcactcaccctggaggagacttggatggggtggcaaatttctatttggaggaagagggtttccaggatggcagatgccagaagatggtcctgatgtctgaggaagggccacctagtttgacaggatgtgagaggctcacaggttcccatcacttctccagccattccaagtcttggtccttcctttccccccgacagcccctgtttctgtccaggccctga

SEQ ID NO: 144 - protein, 631 aa, human organism [sequence omitted]

SEQ ID NO: 145 - DNA, 5133 bp, human organism
ggctgggctgcgaatagcgtgttcctctccggcggaacacacacacccggccttggggctgtctcctgaagctccctcctccacggagagcgctgagcgccgccgggaattccatcccaccgtgggcacgcagtctttggaggtcccgggcgcagcacgctcggtgtccccacactgcagcaagacagagaccccgcgggaaccttgagcttggaacaacccttgagcctctgcagtcggaagagtgggcgcagcagcccagcggaggccaggcgcgcaacctcgggcgccggggcaaggagagagtgcagggaggcgcagctcaggcgcccggctcaggagcgggaggaagttctcgcggcgccgggagcgcggtggacgcgccctgggcgcacgcccaggcagccttctccctggccctcgggactgtcctcgggcggcaaggaggagcttgctggagtcttagaggccatccagagccagcgagcaggagcgctgcgtctcccgcctcagctaggaagggggagtggcgctggcaggctggagctgggaacccagcgagcgcctgaccttcctcctcctcttcctgaccctcttcgcgtcttgggctccggaggaaggttctagcggctgcaggaggtccccagacccattttcctagaaggctggtgatggatctgctgctcctgccgccgccggggcacttggagcgcaccggcggcgcgtgagctgggctttgctctccaccgccctgggcaaaccccgggccagccccgcctggcacctttgcctgagtccctttcggttcccgacccaaagccaccagcgtccagggagggaggaggaggtggtcctcaggtgcagccccgccgagatgtccgcgcagagcctgctccacagcgtcttctcctgttcctcgcccgcttcaagtagcgcggcctcggccaagggcttctccaagaggaagctgcgccagacccgcagcctggacccggccctgatcggcggctgcgggagcgacgaggcgggcgcggagggcagtgcgcggggagccacggcgggccgcctctactccccatcactcccagccgagagtctcggccctcgcttggcgtcctcttcccggggtccgccccccagggccaccaggctaccgcctcctggacctctttgctcgtccttctccacacccagcaccccgcaggagaagtcaccatccggcagctttcactttgactatgaggttcccctgggtcgcggcggcctcaagaagagcatggcctgggacctgccttctgtcctggccgggccagccagtagccgaagcgcttccagcatcctctgttcatccgggggaggccccaatggcatcttcgcttctcctaggaggtggctccagcagaggaagttccagtccccacccgacagtcgcgggcacccctacgtcgtgtggaaatccgagggtgatttcacctggaacagcatgtcaggccgcagtgtgcggctgaggtcagtccccatccagagtctctcagagctggagagggcccggctgcaggaagtgcctttttatcagttgcaacaggactgtgacctgagctgtcagatcaccattcccaaagatggacaaaagagaaagaaatctttaagaaagaaactggattcactaggaaaggagaaaaacaaagacaaagaattcatcccacaggcatttggaatgcccttatcccaagtcattgcgaatgacagggcctataaactcaagcaggacttgcagagggacgagcagaaagatgcatctgactttgtggcttccctcctcccatttggaaataaaagacaaaacaaagaactctcaagcagtaactcatctctcagctcaacctcagaaacaccgaatgagtcaacgtccccaaacaccccggaaccggctcctcgggctaggaggaggggtgccatgtcagtggattctatcaccgatcttgatgacaatcagtctcgactactagaagctttacaactttccttgcctgctgaggctcaaagtaaaaaggaaaaagccagagataagaaactcagtctgaatcctatttacagacaggtccctaggctggtggacagctgctgtcagcacctagaaaaacatggcctccagacagtggggatattccgagttggaagctcaaaaaagagagtgagacaattacgtgaggaatttgaccgtgggattgatgtctctctggaggaggagcacagtgttcatgatgtggcagccttgctgaaagagttcctgagggacatgccagacccccttctcaccagggagctgtacacagctttcatcaacactctcttgttggagccggaggaacagctgggcaccttgcagctcctcatataccttctacctccctgcaactgcgacaccctccaccgcctgctacagttcctctccatcgtggccaggcatgccgatgacaacatcagcaaagatgggcaagaggtcactgggaataaaatgacatctctaaacttagccaccatatttggacccaacctgctgcacaagcagaagtcatcagacaaagaattctcagttcagagttcagcccgggctgaggagagcacggccatcatcgctgttgtgcaaaagatgattgaaaattatgaagccctgttcatggttcccccagatctccagaacgaagtgctgatcagcctgttagagaccgatcctgatgtcgtggactatttactcagaagaaaggcttcccaatcatcaagccctgacatgctgcagtcggaagtttccttttccgtgggagggaggcattcatctacagactccaacaaggcctccagcggagacatctccccttatgacaacaactccccagtgctgtctgagcgctccctgctggctatgcaagaggacgcggccccggggggctcggagaagctttacagagtgccagggcagtttatgctggtgggccacttgtcgtcgtcaaagtcaagggaaagttctcctggaccaaggcttgggaaagatctgtcagaggagcctttcgatatctggggaacttggcattcaacattaaaaagcggatccaaagacccaggaatgacaggttcctctggagacatttttgaaagcagctccctaagagcggggccctgctccctttctcaagggaacctgtccccaaattggcctcggtggcaggggagccccgcagagctggacagcgacacgcagggggctcggaggactcaggccgcagcccccgcgacggagggcagggcccaccctgcggtgtcgcgcgcctgcagcacgccccacgtccaggtggcagggaaagccgagcggcccacggccaggtcggagcagtacttgaccctgagcggcgcccacgacctcagcgagagtgagctggatgtggccgggctgcagagccgggccacacctcagtgccaaagaccccatgggagtgggagggatgacaagcggcccccgcctccatacccgggcccagggaagcccgcggcagcggcagcctggatccaggggcccccggaaggcgtggagacacccacggaccagggaggccaagcagccgagcgagagcagcaggtcacgcagaaaaaactgagcagcgccaactccctgccagcgggcgagcaggacagtccgcgcctgggggacgctggctggctcgactggcagagagagcgctggcagatctgggagctcctgtcgaccgacaaccccgatgccctgcccgagacgctggtctgagcccgcacccagccgagccccccctgccccgagccccccgccctccagcccaggggggaccgtgggtggtggccactggcacacttagtgttcttctttcacacttctcaaaagtgacacaagagaaatccagttcacctacagaggtagagcactcacgcccccgccattgagaataaggttccattgcgtagccagccttaggaaaaacaaacagaacccaaaccagatggcaatgtccaatctaaaaacgtccctcttggctctataatataagatacaactcttgcttggtatagcctaaccgtatttatgtgtcttcggttttgactattgtgtattctgtaacagattatgtataatcatatatgatatattcacaaagagaaaacaaaaggaacttttaaaaaaaaaatcacttcacttatattaagcaatgagatatactaaacaatgagattctatagaatgttctagaatgtgcacaagcgggtttctgtgcttttgccatagctttataactggggataacccttccttcgataccaaacactaacaagaggaagcagaatatgagaagccatatttttacataggagtcagatacaaaaagaaaaatcactgaatgcttttagatattgaatacgttttcaggaaaatgctaaatctgatagattacgaaatatatttttagaacttgtttagaaaggattcagttaaccaaacaagaaaaaggcagtgcctcacaaagaaattaagaagttgtccgtcccacgttacatcaaattcagttttatataggccatatataatatatatttataatgtataatttttatgtatttttcaaaactacaaactggaatccaactataaagtgtttaagaatctacacagaatattcaaattatagaacatgttttttccctttgccccataatcagtatttgccaaattacatgcaattccttaaaaactaaatcacattggtaaaaggcctacagctttgtacttacattgtgccaaaggctgaggaaatgttttctttcgaatttttatgtgtattgtaaaatgttctaccgtactttagtagtttgaagttttcaagtgcataactatttttgaccagcagaaggcgatacgcttcagtattttatgcaattttttttcacttcgaagggaaagtgtattataaaaaaagattttttttttttaaaacatgctactcttaattttcatgttggtgatgaaattcccagtggtgtttcttaaggttctatcttgtgccatgatgaataaaaagttaagcaaaaaaaaaaaaaaaaaaaaaaaaa

SEQ ID NO: 146 - protein, 974 aa, human organism
MSAQSLLHSVFSCSSPASSSAASAKGFSKRKLRQTRSLDPALIGGCGSDEAGAEGSARGATAGRLYSPSLPAESLGPRLASSSRGPPPRATRLPPPGPLCSSFSTPSTPQEKSPSGSFHFDYEVPLGRGGLKKSMAWDLPSVLAGPASSRSASSILCSSGGGPNGIFASPRRWLQQRKFQSPPDSRGHPYVVWKSEGDFTWNSMSGRSVRLRSVPIQSLSELERARLQEVPFYQLQQDCDLSCQITIPKDGQKRKKSLRKKLDSLGKEKNKDKEFIPQAFGMPLSQVIANDRAYKLKQDLQRDEQKDASDFVASLLPFGNKRQNKELSSSNSSLSSTSETPNESTSPNTPEPAPRARRRGAMSVDSITDLDDNQSRLLEALQLSLPAEAQSKKEKARDKKLSLNPIYRQVPRLVDSCCQHLEKHGLQTVGIFRVGSSKKRVRQLREEFDRGIDVSLEEEHSVHDVAALLKEFLRDMPDPLLTRELYTAFINTLLLEPEEQLGTLQLLIYLLPPCNCDTLHRLLQFLSIVARHADDNISKDGQEVTGNKMTSLNLATIFGPNLLHKQKSSDKEFSVQSSARAEESTAIIAVVQKMIENYEALFMVPPDLQNEVLISLLETDPDVVDYLLRRKASQSSSPDMLQSEVSFSVGGRHSSTDSNKASSGDISPYDNNSPVLSERSLLAMQEDAAPGGSEKLYRVPGQFMLVGHLSSSKSRESSPGPRLGKDLSEEPFDIWGTWHSTLKSGSKDPGMTGSSGDIFESSSLRAGPCSLSQGNLSPNWPRWQGSPAELDSDTQGARRTQAAAPATEGRAHPAVSRACSTPHVQVAGKAERPTARSEQYLTLSGAHDLSESELDVAGLQSRATPQCQRPHGSGRDDKRPPPPYPGPGKPAAAAAWIQGPPEGVETPTDQGGQAAEREQQVTQKKLSSANSLPAGEQDSPRLGDAGWLDWQRERWQIWELLSTDNPDALPETLV

SEQ ID NO: 147 - DNA, 2397 bp, human organism
cccccgagccgcgccgagtctgccgccgccgcagcgcctccgctccgccaactccgccggcttaaattggactcctagatccgcgagggcgcggcgcagccgagcagcggctctttcagcattggcaaccccaggggccaatatttcccacttagccacagctccagcatcctctctgtgggctgttcaccaactgtacaaccaccatttcactgtggacattactccctcttacagatatgggagacatgggagatccaccaaaaaaaaaacgtctgatttccctatgtgttggttgcggcaatcagattcacgatcagtatattctgagggtttctccggatttggaatggcatgcggcatgtttgaaatgtgcggagtgtaatcagtatttggacgagagctgtacatgctttgttagggatgggaaaacctactgtaaaagagattatatcaggttgtacgggatcaaatgcgccaagtgcagcatcggcttcagcaagaacgacttcgtgatgcgtgcccgctccaaggtgtatcacatcgagtgtttccgctgtgtggcctgcagccgccagctcatccctggggacgaatttgcgcttcgggaggacggtctcttctgccgagcagaccacgatgtggtggagagggccagtctaggcgctggcgacccgctcagtcccctgcatccagcgcggccactgcaaatggcagcggagcccatctccgccaggcagccagccctgcggccccacgtccacaagcagccggagaagaccacccgcgtgcggactgtgctgaacgagaagcagctgcacaccttgcggacctgctacgccgcaaacccgcggccagatgcgctcatgaaggagcaactggtagagatgacgggcctcagtccccgtgtgatccgggtctggtttcaaaacaagcggtgcaaggacaagaagcgaagcatcatgatgaagcaactccagcagcagcagcccaatgacaaaactaatatccaggggatgacaggaactcccatggtggctgccagtccagagagacacgacggtggcttacaggctaacccagtggaagtacaaagttaccagccaccttggaaagtactgagcgacttcgccttgcagagtgacatagatcagcctgcttttcagcaactggtcaatttttcagaaggaggaccgggctctaattccactggcagtgaagtagcatcaatgtcctctcaacttccagatacacctaacagcatggtagccagtcctattgaggcatgaggaacattcattctgtattttttttccctgttggagaaagtgggaaattataatgtcgaactctgaaacaaaagtatttaacgacccagtcaatgaaaactgaatcaagaaatgaatgctccatgaaatgcacgaagtctgttttaatgacaaggtgatatggtagcaacactgtgaagacaatcatgggattttactagaattaaacaacaaacaaaacgcaaaacccagtatatgctattcaatgatcttagaagtactgaaaaaaaaagacgtttttaaaacgtagaggatttatattcaaggatctcaaagaaagcattttcatttcactgcacatctagagaaaaacaaaaatagaaaattttctagtccatcctaatctgaatggtgctgtttctatattggtcattgccttgccaaacaggagctccagcaaaagcgcaggaagagagactggcctccttggctgaaagagtcctttcaggaaggtggagctgcattggtttgatatgtttaaagttgactttaacaaggggttaattgaaatcctgggtctcttggcctgtcctgtagctggtttattttttactttgccccctccccactttttttgagatccatcctttatcaagaagtctgaagcgactataaaggtttttgaattcagatttaaaaaccaacttataaagcattgcaacaaggttacctctattttgccacaagcgtctcgggattgtgtttgacttgtgtctgtccaagaacttttcccccaaagatgtgtatagttattggttaaaatgactgttttctctctctatggaaataaaaaggaaaaaaaaaaggaaactttttttgtttgctcttgcattgcaaaaattataaagtaatttattatttattgtcggaagacttgccacttttcatgtcatttgacattttttgtttgctgaagtgaaaaaaaaagataaaggttgtacggtggtctttgaattatatgtctaattctatgtgttttgtctttttcttaaatattatgtgaaatcaaagcgccatatgtagaattatatcttcaggactatttcactaataaacatttggcatagat

SEQ ID NO: 148 - protein, 346 aa, human organism
MGDPPKKKRLISLCVGCGNQIHDQYILRVSPDLEWHAACLKCAECNQYLDESCTCFVRDGKTYCKRDYIRLYGIKCAKCSIGFSKNDFVMRARSKVYHIECFRCVACSRQLIPGDEFALREDGLFCRADHDVVERASLGAGDPLSPLHPARPLQMAAEPISARQPALRPHVHKQPEKTTRVRTVLNEKQLHTLRTCYAANPRPDALMKEQLVEMTGLSPRVIRVWFQNKRCKDKKRSIMMKQLQQQQPNDKTNIQGMTGTPMVAASPERHDGGLQANPVEVQSYQPPWKVLSDFALQSDIDQPAFQQLVNFSEGGPGSNSTGSEVASMSSQLPDTPNSMVASPIEA

SEQ ID NO: 149 - DNA, 1886 bp, human organism
gcggagctctgccttggagattctcagtgctgcggatcatgtccctaaggggcagcctctcgcgtctcctccagacgcgagtgcattccatcctgaagaaatccgtccactccgtggctgtgataggagccccgttctcacaagggcagaaaagaaaaggagtggagcatggtcccgctgccataagagaagctggcttgatgaaaaggctctccagtttgggctgccacctaaaagactttggagatttgagttttactccagtccccaaagatgatctctacaacaacctgatagtgaatccacgctcagtgggtcttgccaaccaggaactggctgaggtggttagcagagctgtgtcagatggctacagctgtgtcacactgggaggagaccacagcctggcaatcggtaccattagtggccatgcccgacactgcccagacctttgtgttgtctgggttgatgcccatgctgacatcaacacaccccttaccacttcatcaggaaatctccatggacagccagtttcatttctcctcagagaactacaggataaggtaccacaactcccaggattttcctggatcaaaccttgtatctcttctgcaagtattgtgtatattggtctgagagacgtggaccctcctgaacattttattttaaagaactatgatatccagtatttttccatgagagatattgatcgacttggtatccagaaggtcatggaacgaacatttgatctgctgattggcaagagacaaagaccaatccatttgagttttgatattgatgcatttgaccctacactggctccagccacaggaactcctgttgtcgggggactaacctatcgagaaggcatgtatattgctgaggaaatacacaatacagggttgctatcagcactggatcttgttgaagtcaatcctcagttggccacctcagaggaagaggcgaagactacagctaacctggcagtagatgtgattgcttcaagctttggtcagacaagagaaggagggcatattgtctatgaccaacttcctactcccagttcaccagatgaatcagaaaatcaagcacgtgtgagaatttaggagacactgtgcactgacatgtttcacaacaggcattccagaattatgaggcattgaggggatagatgaatactaaatggttgtctgggtcaatactgccttaatgagaacatttacacattctcacaattgtaaagtttcccctctattttggtgaccaatactactgtaaatgtatttggttttttgcagttcacagggtattaatatgctacagtactatgtaaatttaaagaagtcataaacagcatttattaccttggtatatcatactggtcttgttgctgttgttccttcacatttaagtggtttttcatctttcctccctcctcccacagcctggctatacagtgcatccttgaactgtcagcccacagcagcaatatgcttattctatccacatccctaacatcatgcattcacaaggtcaaagttctggtccacaaacccttccctatagaagttcaatggctgcgaaagaatttgtagtaaaccaggcctcccaggatggcgagctccagtaagatgataatggaaagcagcagcttgttggttgtcactctacaaagagaagcaaagtggggagtagtcagaagtttggataaccttccttctaaacatttgggggttagacctgggaccacggctggatactctgaggctgtatgtttgatcacacagccacttagcaggaagtactcataaggttctttagctgtcacttagggataacactgtctacctcacagaaatgttaaactgagacaataaaacccaaagcat

SEQ ID NO: 150 - protein, 354 aa, human organism
MSLRGSLSRLLQTRVHSILKKSVHSVAVIGAPFSQGQKRKGVEHGPAAIREAGLMKRLSSLGCHLKDFGDLSFTPVPKDDLYNNLIVNPRSVGLANQELAEVVSRAVSDGYSCVTLGGDHSLAIGTISGHARHCPDLCVVWVDAHADINTPLTTSSGNLHGQPVSFLLRELQDKVPQLPGFSWIKPCISSASIVYIGLRDVDPPEHFILKNYDIQYFSMRDIDRLGIQKVMERTFDLLIGKRQRPIHLSFDIDAFDPTLAPATGTPVVGGLTYREGMYIAEEIHNTGLLSALDLVEVNPQLATSEEEAKTTANLAVDVIASSFGQTREGGHIVYDQLPTPSSPDESENQARVRI

SEQ ID NO: 151 - DNA, 1554 bp, human organism
aattatatatttttactctatgtttctctacatgtttttttctttccgttgctggcggaagaggcacgtgcgctgctgaatggagctggtcgctggttgctacgagcaggtcctctttgggttcgctgtacacccggagcccaaggcttgcggcgaccacgagcaatggactcttgtggctgacttcactcaccatgctcacactgcctccttgtcagcagtagctgtaaatagtcgttttgtggtcactgggagcaaagatgaaacaattcacatttatgacatgaaaaagaagattgagcatggggctctagtgcatcacagtggtacaataacttgcctgaaattctatggcaacaggcatttaatcagtggagcggaagatggactcatctgtatctgggatgcaaagaaatgggaatgcctgaagtcaattaaagctcacaaaggacaggtgaccttcctttctattcacccatctggcaagttggccctgtcggttggtacagataaaactttaagaacgtggaatcttgtagaaggaagatcagcattcataaaaaatataaaacaaaatgctcacatagtagaatggtccccaagaggagagcagtatgtagttatcatacagaataaaatagacatctatcagcttgacactgcatccattagtggcaccatcacaaatgaaaagagaatttcctctgttaaatttctttcagagtctgtccttgcagtggctggagatgaagaagttataaggttttttgactgtgattcactagtgtgcctctgcgaatttaaagctcatgaaaacagggtaaaggacatgttcagttttgaaattccagagcatcatgttattgtttcagcatcgagtgatggtttcatcaaaatgtggaagcttaagcaggataagaaagttcccccatctttactctgtgaaataaacactaatgccaggctgacgtgtcttggagtgtggctagacaaagtggcagacatgaaaagccttcctccagctgcagagccttctcctgtaagtaaagaacagtccaaaattggcaaaaaggagcctggtgacacagtgcacaaagaagaaaagcggtcaaaacctaacacaaagaaacgcggtttaacaggtgacagtaagaaagcaacaaaagaaagtggcctgatatcaaccaagaagaggaaaatggtagaaatgttggaaaagaagaggaaaaagaagaaaataaaaacaatgcagtgaatcacagatgtctcctgaaagaactcttttagatgaaatcattctactcaaatgtaccttaatttttttttttccctgagtaaaagcaagaaatttcttcctttggaaaaaatatatatattaaaaaaccacttttagatggttttttttaaaaaaaaaaaaaaaactggtaaaattacttttggcagacagtgttttatgaattatgtatcatgttgatatataatatgttaatgtgtcatgtaatttttactttgtacaaagcaaataaagatctttctcaaaaaaaaaaaaaaaaa

SEQ ID NO: 152 - protein, 391 aa, human organism
MELVAGCYEQVLFGFAVHPEPKACGDHEQWTLVADFTHHAHTASLSAVAVNSRFVVTGSKDETIHIYDMKKKIEHGALVHHSGTITCLKFYGNRHLISGAEDGLICIWDAKKWECLKSIKAHKGQVTFLSIHPSGKLALSVGTDKTLRTWNLVEGRSAFIKNIKQNAHIVEWSPRGEQYVVIIQNKIDIYQLDTASISGTITNEKRISSVKFLSESVLAVAGDEEVIRFFDCDSLVCLCEFKAHENRVKDMFSFEIPEHHVIVSASSDGFIKMWKLKQDKKVPPSLLCEINTNARLTCLGVWLDKVADMKSLPPAAEPSPVSKEQSKIGKKEPGDTVHKEEKRSKPNTKKRGLTGDSKKATKESGLISTKKRKMVEMLEKKRKKKKIKTMQ

SEQ ID NO: 153 - DNA, 5285 bp, human organism
gatgtcttggacatgctctggctggctaatctccatgttctagccgactgaaaatacggtggccaagtggatggtgtgcttatttgcagtctaaagaaatttccttttgatgtggcagaaaatcgaggatgtggagtggagaccccagacttacttggagctggagggtctgccttgcatcctgatcttcagtgggatggacccgcatggggagtccttgccgaggtctttgaggtactgtgacctgcgattgataaactcctcctgcttggtgagaacagccttggagcaggagctgggcctggctgcctactttgtgagcaacgaggttcccttggagaagggggctaggaacgaggccttggagagtgatgctgagaagctgagcagcacagacaacgaggatgaggagctggggacagaaggctctacctcggagaagagaagccccatgaaaagggagaggtcccgctcccacgactcagcatcctcatccctctcctccaaggcttccggttcagcgctcggtggcgagtcctcggctcagcccacagcactcccccagggagagcatgccaggtcgccccagccccgtggccccgcagaggagggcagagcccctggtgagaaacagaggccccgggcaagtcaggggccaccctcggccatcagcaggcacagtcccgggccgacgccccagcccgactgtagcctcaggaccggccagaggagcgtccaggtgtcggtcacctcgtcgtgctcccagctgtcctcctcctcgggctcatcctcctcatccgtggcgcccgctgccggcacgtgggtcctgcaggcctcccagtgctccttgaccaaggcctgccgccagccacccattgtcttcttgcccaagctcgtgtacgacatggttgtgtccactgacagcagtggcctgcccaaggccgcctccctcctgccctccccctcggtcatgtgggccagctctttccgccccctgctcagcaagaccatgacatccaccgagcagtccctctactaccggcagtggacggtgccccggcccagccacatggactacggcaaccgggccgagggccgcgtggacggcttccacccccgcaggctgctgctcagcggcccccctcagatcgggaagacaggtgcctacctgcagttcctcagtgtcctgtccaggatgcttgttcggctcacagaagtggatgtctatgacgaggaggagatcaatatcaacctcagagaagaatctgactggcattatctccagcttagcgacccctggccagacctggagctgttcaagaagttgccctttgactacatcattcacgacccgaagtatgaagatgccagcctgatttgttcgcactatcagggtataaagagtgaagacagagggatgtcccggaagccggaggacctttatgtgcggcgtcagacggcacggatgagactgtccaagtacgcagcgtacaacacttaccaccactgtgagcagtgccaccagtacatgggcttccacccccgctaccagctgtatgagtccaccctgcacgcctttgccttctcttactccatgctaggagaggagatccagctgcacttcatcatccccaagtccaaggagcaccactttgtcttcagccaacctggaggccagctggagagcatgcgactacccctcgtgacagacaagagccatgaatatataaaaagtccgacattcactccaaccaccggccgtcacgaacatgggctctttaatctgtaccacgcaatggacggtgccagccatttgcacgtgctggttgtcaaggaatacgagatggcaatttataagaaatattggcccaaccacatcatgctggtgctccccagtatcttcaacagtgctggagttggtgctgctcatttcctcatcaaggagctgtcctaccataacctggagctcgagcggaaccggcaggaggagctgggaatcaagccgcaggacatctggcctttcattgtgatctctgatgactcctgcgtgatgtggaacgtggtggatgtcaactctgctggggagagaagcagggagttctcctggtcggaaaggaacgtgtctttgaagcacatcatgcagcacatcgaggcggcccccgacatcatgcactacgccctgctgggcctgcggaagtggtccagcaagacccgggccagcgaggtgcaagagcccttctcccgctgccacgtgcacaacttcatcatcctgaacgtggacctgacccagaacgtgcagtacaaccagaaccggttcctgtgtgacgatgtagacttcaacctgcgggtgcacagcgccggcctcctgctctgccggttcaaccgcttcagcgtgatgaagaagcagatcgtggtgggcggccacaggtccttccacatcacatccaaggtgtctgataactctgccgcggtcgtgccggcccagtacatctgtgccccggacagcaagcacacgttcctcgcagcgcccgcccagctcctgctggagaagttcctgcagcaccacagccacctcttcttcccgctgtccctgaagaaccatgaccacccagtgctgtctgtcgactgttacctgaacctgggatctcagatttctgtttgctatgtgagctccaggccccactctttaaacatcagctgctcggacttgctgttcagtgggctgctgctgtacctctgtgactcttttgtgggagctagctttttgaaaaagtttcattttctgaaaggtgcgacgttgtgtgtcatctgtcaggaccggagctcactgcgccagacggtcgtccgcctggagctcgaggacgagtggcagttccggctgcgcgatgagttccagaccgccaatgccagggaagaccggccgctcttttttctgacgggacgacacatctgaggaagacagcggcgagttttctgaagagatgagtgctcagagccctcatgctgttgaggctaaagggaggcctggaacggtggggcgtttgactggaatggaccccagggactgtccaggtgcagcccctcctagtacacatgggcccccgaggccgtggtcctgggagccaggaagactccgcagtgggtgagaatgaaaacttgagactcccaagttctgggccagcccattgctctgggctgttttaaagcccatttcacgaggaacaaagatttacttcctgtcctgccattcgtgtgcttccatggacaaacctgatttttttctcttagttctaaagaatcttgggttattttgtagcggtgccagtatttcagtagatgggatttcagccaagtaggttcccctgtaacctcctacaaagcaatattccaaaggaacattttaactgtaaaggctggagacaagaaaaaataagtagatcgttttaataacaattatttaattgcctataagtttgctgtttcagaggctagcccaaaggcatcaaatttaataaagttaaacaaattgatttacttcagagcaaatatgatcctattaaaataatatagggtaaataccctacctcttagaaagggcaaaaatgcaaagaagctttctttaaaactaaaagggttttttggggggggagttggcggggaggaaataaggctaacagaggttgacctaaaattagccttacaaaggagaaaggaccacattgcttacttgaaacagacaatgaaaacaaccaaagtgatatataaaatagttgatgagaactagacttatgactgtagtttactagagtttagttttcagttgctgaagtagctcattttctcttactaatgtttggttcctcagggaagaatctcacttgactagagaggaggtgggaacagaagagagaaggaggcagggagatgtatttcttagggctcaccccttcacagactgacagaatggttttgttttgttttgttttgttttgttttgtttttgagatggactctagctctgtcacccaggctggagtgcagtggtgcgatctcggctcactgcaagctccgcctcccgggttctcaccattctcctgcctcagcctcccgagtagctgggactacaggcgcccaccaccacgcccggctaattttttgtattttttagtagagacggggtttcaccatgttagccaggatggtctcgatctcctgacctcgtgatccgcccgcctcggcctcccaaagtgctgggattacaggcgtgagccaccgtgcctgccccagaatggtttttaaagccacagttgagaggccacccattgcccggcgcctggacagtgatcatcttgttcatcttgttcagtcctttcttgtgtgattggaattattcatcccctttgaaagatgagaaggttgagatgcaaagagtctacctttccaagttctcactgctggaaagagctagaagcacagttcaaagttctggcttctggactctgcagtccaggtctcccttctcccacttgcctaccctcaatgccacactgtttttgaagtggcccataacttgaaggaaaagtttaaagacagttcaatttaatcatcagaatgcattcttttttttttcggagacggagtttcactcttgctgcccaggctggagtgcaatggtgcaatgatctcggctcactgcaacctctgcctcctgggttcaagtgattctccagcctcagcctcccgagtagctgggattatgggcgcccaccaccatgcccagctaatttttgtattttttttttttagtagagatggggtttcgccaggttggccaggctggtcttgtgaactcctggcctcaggtgatctgcccacctcatcctccaaaagtgctgggattacaggcatgagccactgcgcctggcctcagaatgcattcttacacatctatcctagacatttataagcactctaatggataacaatccaagaataaatgattgtaaaagatgatgccgaagagttgatgtcaatctttttttcctaagaaaaaaagtccgcgagtattaaatatttagatcaatgtttataaaatgattactttgtatatctcattattcctattttggaataaaaactgaccttctttaatcatatacttgtcttttgtaaatagcagcttttgtgtcattctccccactttattagttaatttaaattggaaaaaaccctcaaactaatattcttgtctgttccagtcttataaataaaacttataatgcatg

SEQ ID NO: 154 - protein, 947 aa, human organism
MWQKIEDVEWRPQTYLELEGLPCILIFSGMDPHGESLPRSLRYCDLRLINSSCLVRTALEQELGLAAYFVSNEVPLEKGARNEALESDAEKLSSTDNEDEELGTEGSTSEKRSPMKRERSRSHDSASSSLSSKASGSALGGESSAQPTALPQGEHARSPQPRGPAEEGRAPGEKQRPRASQGPPSAISRHSPGPTPQPDCSLRTGQRSVQVSVTSSCSQLSSSSGSSSSSVAPAAGTWVLQASQCSLTKACRQPPIVFLPKLVYDMVVSTDSSGLPKAASLLPSPSVMWASSFRPLLSKTMTSTEQSLYYRQWTVPRPSHMDYGNRAEGRVDGFHPRRLLLSGPPQIGKTGAYLQFLSVLSRMLVRLTEVDVYDEEEININLREESDWHYLQLSDPWPDLELFKKLPFDYIIHDPKYEDASLICSHYQGIKSEDRGMSRKPEDLYVRRQTARMRLSKYAAYNTYHHCEQCHQYMGFHPRYQLYESTLHAFAFSYSMLGEEIQLHFIIPKSKEHHFVFSQPGGQLESMRLPLVTDKSHEYIKSPTFTPTTGRHEHGLFNLYHAMDGASHLHVLVVKEYEMAIYKKYWPNHIMLVLPSIFNSAGVGAAHFLIKELSYHNLELERNRQEELGIKPQDIWPFIVISDDSCVMWNVVDVNSAGERSREFSWSERNVSLKHIMQHIEAAPDIMHYALLGLRKWSSKTRASEVQEPFSRCHVHNFIILNVDLTQNVQYNQNRFLCDDVDFNLRVHSAGLLLCRFNRFSVMKKQIVVGGHRSFHITSKVSDNSAAVVPAQYICAPDSKHTFLAAPAQLLLEKFLQHHSHLFFPLSLKNHDHPVLSVDCYLNLGSQISVCYVSSRPHSLNISCSDLLFSGLLLYLCDSFVGASFLKKFHFLKGATLCVICQDRSSLRQTVVRLELEDEWQFRLRDEFQTANAREDRPLFFLTGRHI

SEQ ID NO: 155 - DNA, 1167 bp, human organism
atgacagcctccgtgctcctccacccccgctggatcgagcccaccgtcatgtttctctacgacaacggcggcggcctggtggccgacgagctcaacaagaacatggaaggggcggcggcggctgcagcagcggctgcagcggcggcggctgccggggccgggggcgggggcttcccccacccggcggctgcggcggcagggggcaacttctcggtggcggccgcggccgcggctgcggcggccgccgcggccaaccagtgccgcaacctgatggcgcacccggcgcccttggcgccaggagccgcgtccgcctacagcagcgcccccggggaggcgcccccgtcggctgccgccgctgctgccgcggctgccgctgcagccgccgccgccgccgccgcgtcgtcctcgggaggtcccggcccggcgggcccggcggcggcagaggcggccaagcaatgcagcccctgctcggcagcggcgcagagctcgtcggggcccgcggcgctgccctatggctacttcggcagcggctactacccgtgcgcccgcatgggcccgccccccaacgccatcaagtcgtgcccccagcccccctcggccgccgccgccgccgccttcgcggacaagtacatggataccgccggcccagctgccgaggagttcagctcccgcgctaaggagttcgcgttctaccaccagggctacgcagccgggccttaccaccaccatcagcccatgcctggctacctggatatgccagtggtgccgggcctcgggggccccggcgagtcgcgccacgaacccttgggtcttcccatggaaagctaccagccctgggcgctgcccaacggctggaacggccaaatgtactgccccaaagagcaggcgcagcctccccacctctggaagtccactctgcccgacgtggtctcccatccctcggatgccagctcctataggagggggagaaagaagcgcgtgccttataccaaggtgcaattaaaagaacttgaacgggaatacgccacgaataaattcattactaaggacaaacggaggcggatatcagccacgacgaatctctctgagcggcaggtcacaatctggttccagaacaggagggttaaagagaaaaaagtcatcaacaaactgaaaaccactagttaa

SEQ ID NO: 156 - protein, 388 aa, human organism
MTASVLLHPRWIEPTVMFLYDNGGGLVADELNKNMEGAAAAAAAAAAAAAAGAGGGGFPHPAAAAAGGNFSVAAAAAAAAAAAANQCRNLMAHPAPLAPGAASAYSSAPGEAPPSAAAAAAAAAAAAAAAAAASSSGGPGPAGPAAAEAAKQCSPCSAAAQSSSGPAALPYGYFGSGYYPCARMGPPPNAIKSCPQPPSAAAAAAFADKYMDTAGPAAEEFSSRAKEFAFYHQGYAAGPYHHHQPMPGYLDMPVVPGLGGPGESRHEPLGLPMESYQPWALPNGWNGQMYCPKEQAQPPHLWKSTLPDVVSHPSDASSYRRGRKKRVPYTKVQLKELEREYATNKFITKDKRRRISATTNLSERQVTIWFQNRRVKEKKVINKLKTTS

SEQ ID NO: 157 - DNA, 3004 bp, human organism
cccttatggcgattgggcggctgcagagaccaggactcagttcccctgccctagtctgagcctagtgggtgggactcagctcagagtcagttttcagaagcaggtttcagttgcagagttttcctacacttttcctgcgctagagcagcgagcagcctggaacagacccaggcggaggacacctgtgggggagggagcgcctggaggagcttagagaccccagccgggcgtgatctcaccatgtgcggatttgcgaggcgcgccctggagctgctagagatccggaagcacagccccgaggtgtgcgaagccaccaagactgcggctcttggagaaagcgtgagcagggggccaccgcggtctccggcctgtctgcaccctgtcgcctgagctgcctgacagtgacaatgacatcccagttaccagtgtccttgaattgatagtggcttctgtttgtcagtctcatataagaactacagctcatcaggaggagatcgcagcagggtaagagacaccaacaccatgttctgcacgaagctcaaggatctcaagatcacaggagagtgtcctttctccttactggcaccaggtcaagttcctaacgagtcttcagaggaggcagcaggaagctcagagagctgcaaagcaaccgtgcccatctgtcaagacattcctgagaagaacatacaagaaagtcttcctcaaagaaaaaccagtcggagccgagtctatcttcacactttggcagagagtatttgcaaactgattttcccagagtttgaacggctgaatgttgcacttcagagaacattggcaaagcacaaaataaaagaaagcaggaaatctttggaaagagaagactttgaaaaaacaattgcagagcaagcagtgcagcagagtccagtggagttatcaaagaatctcttggtgaagaggtttttaaaatatgttacgaggaagatgaaaacatccttggggtggttggaggcacccttaaagatttttaaacagcttcagtacccttctgaaacagagcagccattgccaagaagcaggaaaaaggggcagcttgaggacgcctccattctatgcctggataaggaggatgattttctacatgtttactacttcttccctaagagaaccacctccctgattcttcccggcatcataaaggcagctgctcacgtattatatgaaacggaagtggaagtgtcgttaatgcctccctgcttccataatgattgcagcgagtttgtgaatcagccctacttgttgtactccgttcacatgaaaagcaccaagccatccctgtcccccagcaaaccccagtcctcgctggtgattcccacatcgctattctgcaagacatttccattccatttcatgtttgacaaagatatgacaattctgcaatttggcaatggcatcagaaggctgatgaacaggagagactttcaaggaaagcctaattttgaatactttgaaattctgactccaaaaatcaaccagacctttagcgggatcatgactatgttgaatatgcagtttgttgtacgagtgaggagatgggacaactctgtgaagaaatcttcaagggttatggacctcaaaggccaaatgatctacattgttgaatccagtgcaatcttgtttttggggtcaccctgtgtggacagattagaagattttacaggacgagggctctacctctcagacatcccaattcacaatgcactgagggatgtggtcttaataggggaacaagcccgagctcaagatggcctgaagaagaggctggggaagctgaaggctacccttgagcaagcccaccaagccctggaggaggagaagaaaaagacagtagaccttctgtgctccatatttccctgtgaggttgctcagcagctgtggcaagggcaagttgtgcaagccaagaagttcagtaatgtcaccatgctcttctcagacatcgttgggttcactgccatctgctcccagtgctcaccgctgcaggtcatcaccatgctcaatgcactgtacactcgcttcgaccagcagtgtggagagctggatgtctacaaggtggagaccattgcgatgcctattgtgtggcttgggggattacacaaagagagtgatactcatgctgttcagatagcgctgatggccctgaagatgatggagctctctgatgaagttatgtctccccatggagaacctatcaagatgcgaattggactgcactctggatcagtttttgctggcgtcgttggagttaaaatgccccgttactgtctttttggaaacaatgtcactctggctaacaaatttgagtcctgcagtgtaccacgaaaaatcaatgtcagcccaacaacttacagattactcaaagactgtcctggtttcgtgtttacccctcgatcaagggaggaacttccaccaaacttccctagtgaaatccccggaatctgccattttctggatgcttaccaacaaggaacaaactcaaaaccatgcttccaaaagaaagatgtggaagatgcaagccaattttttaggcaaagcatcaggaatagattagcaacctatatacctatttataagtctttggggtttgactcattgaagatgtgtagagcctctgaaagcactttagggattgtagatggctaacaagcagtattaaaatttcaggagccaagtcacaatctttctcctgtttaacatgacaaaatgtactcacttcagtacttcagctcttcaagaaaaaaaaaaaaaccttaaaaagctacttttgtgggagtatttctattatataaccagcacttactacctgtactcaaaattcagcaccttgtacatatatcagataattgtagtcaattgtacaaactgatggagtcacctgcaatctcatatcctggtggaatgccatggttattaaagtgtgtttgtgatagttgtcgtcaaaaaaaaaaaaaaaaaaaaaaaaaaaaaaaaa

SEQ ID NO: 158 - protein, 717 aa, human organism
MFCTKLKDLKITGECPFSLLAPGQVPNESSEEAAGSSESCKATVPICQDIPEKNIQESLPQRKTSRSRVYLHTLAESICKLIFPEFERLNVALQRTLAKHKIKESRKSLEREDFEKTIAEQAVQQSPVELSKNLLVKRFLKYVTRKMKTSLGWLEAPLKIFKQLQYPSETEQPLPRSRKKGQLEDASILCLDKEDDFLHVYYFFPKRTTSLILPGIIKAAAHVLYETEVEVSLMPPCFHNDCSEFVNQPYLLYSVHMKSTKPSLSPSKPQSSLVIPTSLFCKTFPFHFMFDKDMTILQFGNGIRRLMNRRDFQGKPNFEYFEILTPKINQTFSGIMTMLNMQFVVRVRRWDNSVKKSSRVMDLKGQMIYIVESSAILFLGSPCVDRLEDFTGRGLYLSDIPIHNALRDVVLIGEQARAQDGLKKRLGKLKATLEQAHQALEEEKKKTVDLLCSIFPCEVAQQLWQGQVVQAKKFSNVTMLFSDIVGFTAICSQCSPLQVITMLNALYTRFDQQCGELDVYKVETIAMPIVWLGGLHKESDTHAVQIALMALKMMELSDEVMSPHGEPIKMRIGLHSGSVFAGVVGVKMPRYCLFGNNVTLANKFESCSVPRKINVSPTTYRLLKDCPGFVFTPRSREELPPNFPSEIPGICHFLDAYQQGTNSKPCFQKKDVEDASQFFRQSIRNRLATYIPIYKSLGFDSLKMCRASESTLGIVDG

SEQ ID NO: 159 - DNA, 2710 bp, human organism
cgccggcgggactggtctgaagagacgcggggacaaagtggcaacgacttggacatctgagctgtcactgccgaaaacaggccgcaagagagataatcaatatgcatttccaagccttttggctatgtttgggtcttctgttcatctcaattaatgcagaatttatggatgatgatgttgagacggaagactttgaagaaaattcagaagaaattgatgttaatgaaagtgaactttcctcagagattaaatataagacacctcaacctataggagaagtatattttgcagaaacttttgatagtggaaggttggctggatgggtcttatcaaaagcaaagaaagatgacatggatgaggaaatttcaatatacgatggaagatgggaaattgaagagttgaaagaaaaccaggtacctggtgacagaggactggtattaaaatctagagcaaagcatcatgcaatatctgctgtattagcaaaaccattcatttttgctgataaacccttgatagttcaatatgaagtaaattttcaagatggtattgattgtggaggtgcatacattaaactcctagcagacactgatgatttgattctggaaaacttttatgataaaacatcctatatcattatgtttggaccagataaatgtggagaagattataaacttcattttatcttcagacataaacatcccaaaactggagttttcgaagagaaacatgccaaacctccagatgtagaccttaaaaagttctttacagacaggaagactcatctttatacccttgtgatgaatccagatgacacatttgaggtgttagttgatcaaacagttgtaaacaaaggaagcctcctagaggatgtggttcctcctatcaaacctcccaaagaaattgaagatcccaatgataaaaaacctgaggaatgggatgaaagagcaaaaattcctgatccttctgccgtcaaaccagaagactgggatgaaagtgaacctgcccaaatagaagattcaagtgttgttaaacctgctggctggcttgatgatgaaccaaaatttatccctgatcctaatgctgaaaaacctgatgactggaatgaagacacggatggagaatgggaggcacctcagattcttaatccagcatgtcggattgggtgtggtgagtggaaacctcccatgatagataacccaaaatacaaaggagtatggagacctccactggtcgataatcctaactatcagggaatctggagtcctcgaaaaattcctaatccagattatttcgaagatgatcatccatttcttctgacttctttcagtgctcttggtttagagctttggtctatgacctctgatatctactttgataattttattatctgttcggaaaaggaagtagcagatcactgggctgcagatggttggagatggaaaataatgatagcaaatgctaataagcctggtgtattaaaacagttaatggcagctgctgaagggcacccatggctttggttgatttatcttgtgacagcaggagtgccaatagcattaattacttcattttgttggccaagaaaagtaaagaaaaaacataaagatacagagtataaaaaaaccgacatatgtataccacaaacaaaaggagtactagagcaagaagaaaaggaagagaaagcagccctggaaaaaccaatggacctggaagaggaaaaaaagcaaaatgatggtgaaatgcttgaaaaagaagaggaaagtgaacctgaggaaaagagtgaagaagaaattgaaatcatagaagggcaagaagaaagtaatcaatcaaataagtctgggtcagaggatgagatgaaagaagcagatgagagcacaggatctggagatgggccgataaagtcagtacgcaaaagaagagtacgaaaggactaaactagattgaaatatttttaattcccgagaggatgtttggcattgtaaaaatcagcatgccagacctgaactttaatcagtctgcacatcctgtttctaatatctagcaacattatattctttcagacatttattttagtccttcatttccgaggaaaaagaagcaactttgaagttacctcatctttgaatttagaataaaagtggcacattacatatcggatctaagagattaataccattagaagttacacagttttagttgtttggagatagttttggtttgtacagaacaaaataatatgtagcagcttcattgctattggaaaaatcagttattggaatttccacttaaatggctatacaacaatataactggtagttctataataaaaatgagcatatgttctgttgtgaagagctaaatgcaataaagtttctgtatggttgtttgattctatcaacaattgaaagtgttgtatatgacccacatttacctagtttgtgtcaaattatagttacagtgagttgtttgcttaaattatagattcctttaaggacatgccttgttcataaaatcactggattatattgcagcatattttacatttgaatacaaggataatgggttttatcaaaacaaaatgatgtacagattttttttcaagtttttatagttgctttatgccagagtggtttaccccattcacaaaatttcttatgcatacattgctattgaaaataaaatttaaatattttttcatcctgaaaaaaaa

SEQ ID NO: 160 - protein, 610 aa, human organism
MHFQAFWLCLGLLFISINAEFMDDDVETEDFEENSEEIDVNESELSSEIKYKTPQPIGEVYFAETFDSGRLAGWVLSKAKKDDMDEEISIYDGRWEIEELKENQVPGDRGLVLKSRAKHHAISAVLAKPFIFADKPLIVQYEVNFQDGIDCGGAYIKLLADTDDLILENFYDKTSYIIMFGPDKCGEDYKLHFIFRHKHPKTGVFEEKHAKPPDVDLKKFFTDRKTHLYTLVMNPDDTFEVLVDQTVVNKGSLLEDVVPPIKPPKEIEDPNDKKPEEWDERAKIPDPSAVKPEDWDESEPAQIEDSSVVKPAGWLDDEPKFIPDPNAEKPDDWNEDTDGEWEAPQILNPACRIGCGEWKPPMIDNPKYKGVWRPPLVDNPNYQGIWSPRKIPNPDYFEDDHPFLLTSFSALGLELWSMTSDIYFDNFIICSEKEVADHWAADGWRWKIMIANANKPGVLKQLMAAAEGHPWLWLIYLVTAGVPIALITSFCWPRKVKKKHKDTEYKKTDICIPQTKGVLEQEEKEEKAALEKPMDLEEEKKQNDGEMLEKEEESEPEEKSEEEIEIIEGQEESNQSNKSGSEDEMKEADESTGSGDGPIKSVRKRRVRKD

SEQ ID NO: 161 - DNA, 2392 bp, human organism
gcggagcgcgcgctcccagcgaaagcagcagggcagggatctgcgttggaggaagggactgctctggtgctagaatgctgtgcgtcggaaggctgggcggcttgggagccagagcagcagctctgccgccccgccgggcgggccggggaagcctcgaagccgggatccgggcccgaagggtcagcaccagctggtctcccgtgggcgccgccttcaatgtcaagccccagggcagccgcttggacctgttcggcgagcgggcgcgtctttttggagttcctgagctgagtgccccagaaggatttcatattgcacaagaaaaagccttgagaaagacagaattgcttgtggaccgtgcatgttccaccccacctgggccccagaccgtgctgatcttcgatgagctctcggattccttatgcagagtggccgacttggctgattttgtgaaaatcgctcaccctgagccagcattcagagaagctgcggaagaagcttgtagaagtattggcaccatggtagagaagttgaacacaaatgtggatttatatcaaagtttgcaaaaattactagctgataaaaaacttgtggattcccttgatccagaaacaaggcgagtggctgaactgtttatgtttgattttgaaattagtggaatccatctagacaaacaaaagcgtaaaagagcagtggacctcaatgttaaaatcttggatttgagtagtacatttcttatgggaaccaattttcccaacaagattgagaagcatctcttaccagaacacattcgtcgtaactttacatctgctggggatcatatcataattgatggtctccacgcagaatcaccagatgacttggtgcgagaagctgcttataaaatttttctttatcccaatgctggtcaattgaaatgtttagaagaattgctcagcagcagagatcttctggcaaagttggtggggtattccacgttttctcacagggctctccaaggaacgatagctaaaaatccagagactgtcatgcagttccttgaaaaactatctgacaaactttctgaaagaactctgaaagattttgagatgatacgagggatgaaaatgaaactgaatgctcaaaattccgaagtaatgccctgggaccccccttactacagtggtgtgattcgtgcagaaaggtataatattgagcccagcctatattgcccgtttttctctcttggagcatgcatggaaggcctgaatattttgcttaacagactgttggggatttcattatatgcagagcagcctgcaaaaggagaggtgtggagcgaagatgtccgaaaactggctgttgttcatgaatctgaaggattgttggggtacatttactgtgatttttttcagcgagcagacaaaccacatcaggattgccatttcactatccgtggaggcagactaaaggaagatggagactatcaactcccacttgtagttcttatgctgaatcttccccgttcctcaaggagttctccaactttgctaactcctggcatgatggaaaatcttttccatgaaatgggacatgccatgcattcaatgctaggacgtactcgttaccaacacgtcactgggaccaggtgccctactgattttgctgaggttccttctattctgatggagtactttgcaaatgattatcgagtagttaaccaatttgccagacattatcagactggacagccactgccaaaaaatatggtgtctcgtctttgtgaatctaaaaaggtttgtgctgcagctgatatgcaacttcaggtcttttatgccactctggatcaaatctaccatgggaagcatcccctgaggaattcaaccacagacattctcaaggaaacacaagagaaattctatggcctaccatatgttccaaatactgcctggcagctgcgattcagccacctcgtggggtatggtgctagatattactcttacctcatgtccagagcggtcgcctccatggtttggaaggagtgttttctacaggatcctttcaacagggctgccggggagcgctatcgcagggagatgctggcccacggtggaggcagggagcccatgctcatggttgaaggtatgcttcagaagtgtccttctgttgatgacttcgtaagtgccctcgtttccgacttggatctggacttcgaaactttcctcatggattctgaataaaagaaacactctacacctctaatcaaggtcatgtagtaatgactttgttataaatgctacagctgtgagagcttgtttctgattgtttcattgttcgcttctgtaattctgaaaaactttaaactggtagaacttggaataaataatttgttttaattaaaaaaaaaaaaaaaaaa

SEQ ID NO: 162 - protein, 713 aa, human organism
MLCVGRLGGLGARAAALPPRRAGRGSLEAGIRARRVSTSWSPVGAAFNVKPQGSRLDLFGERARLFGVPELSAPEGFHIAQEKALRKTELLVDRACSTPPGPQTVLIFDELSDSLCRVADLADFVKIAHPEPAFREAAEEACRSIGTMVEKLNTNVDLYQSLQKLLADKKLVDSLDPETRRVAELFMFDFEISGIHLDKQKRKRAVDLNVKILDLSSTFLMGTNFPNKIEKHLLPEHIRRNFTSAGDHIIIDGLHAESPDDLVREAAYKIFLYPNAGQLKCLEELLSSRDLLAKLVGYSTFSHRALQGTIAKNPETVMQFLEKLSDKLSERTLKDFEMIRGMKMKLNAQNSEVMPWDPPYYSGVIRAERYNIEPSLYCPFFSLGACMEGLNILLNRLLGISLYAEQPAKGEVWSEDVRKLAVVHESEGLLGYIYCDFFQRADKPHQDCHFTIRGGRLKEDGDYQLPLVVLMLNLPRSSRSSPTLLTPGMMENLFHEMGHAMHSMLGRTRYQHVTGTRCPTDFAEVPSILMEYFANDYRVVNQFARHYQTGQPLPKNMVSRLCESKKVCAAADMQLQVFYATLDQIYHGKHPLRNSTTDILKETQEKFYGLPYVPNTAWQLRFSHLVGYGARYYSYLMSRAVASMVWKECFLQDPFNRAAGERYRREMLAHGGGREPMLMVEGMLQKCPSVDDFVSALVSDLDLDFETFLMDSE

SEQ ID NO: 163 - DNA, 3923 bp, human organism
acagaagaaatagcaagtgccgagaagctggcatcagaaaaacagaggggagatttgtgtggctgcagccgagggagaccaggaagatctgcatggtgggaaggacctgatgatacagaggaattacaacacatatacttagtgtttcaatgaacaccaagataaataagtgaagagctagtccgctgtgagtctcctcagtgacacagggctggatcaccatcgacggcactttctgagtactcagtgcagcaaagaaagactacagacatctcaatggcaggggtgagaaataagaaaggctgctgactttaccatctgaggccacacatctgctgaaatggagataattaacatcactagaaacagcaagatgacaatataatgtctaagtagtgacatgtttttgcacatttccagcccctttaaatatccacacacacaggaagcacaaaaggaagcacagagatccctgggagaaatgcccggccgccatcttgggtcatcgatgagcctcgccctgtgcctggtcccgcttgtgagggaaggacattagaaaatgaattgatgtgttccttaaaggatgggcaggaaaacagatcctgttgtggatatttatttgaacgggattacagatttgaaatgaagtcacaaagtgagcattaccaatgagaggaaaacagacgagaaaatcttgatggcttcacaagacatgcaacaaacaaaatggaatactgtgatgacatgaggcagccaagctggggaggagataaccacggggcagagggtcaggattctggccctgctgcctaaactgtgcgttcataaccaaatcatttcatatttctaaccctcaaaacaaagctgttgtaatatctgatctctacggttccttctgggcccaacattctccatatatccagccacactcatttttaatatttagttcccagatctgtactgtgacctttctacactgtagaataacattactcattttgttcaaagacccttcgtgttgctgcctaatatgtagctgactgtttttcctaaggagtgttctggcccaggggatctgtgaacaggctgggaagcatctcaagatctttccagggttatacttactagcacacagcatgatcattacggagtgaattatctaatcaacatcatcctcagtgtctttgcccatactgaaattcatttcccacttttgtgcccattctcaagacctcaaaatgtcattccattaatatcacaggattaacttttttttttaacctggaagaattcaatgttacatgcagctatgggaatttaattacatattttgttttccagtgcaaagatgactaagtcctttatccctcccctttgtttgattttttttccagtataaagttaaaatgcttagccttgtactgaggctgtatacagcacagcctctccccatccctccagccttatctgtcatcaccatcaacccctcccataccacctaaacaaaatctaacttgtaattccttgaacatgtcaggacatacattattccttctgcctgagaagctcttccttgtctcttaaatctagaatgatgtaaagttttgaataagttgactatcttacttcatgcaaagaagggacacatatgagattcatcatcacatgagacagcaaatactaaaagtgtaatttgattataagagtttagataaatatatgaaatgcaagagccacagagggaatgtttatggggcacgtttgtaagcctgggatgtgaagcaaaggcagggaacctcatagtatcttatataatatacttcatttctctatctctatcacaatatccaacaagcttttcacagaattcatgcagtgcaaatccccaaaggtaacctttatccatttcatggtgagtgcgctttagaattttggcaaatcatactggtcacttatctcaactttgagatgtgtttgtccttgtagttaattgaaagaaatagggcactcttgtgagccactttagggttcactcctggcaataaagaatttacaaagagctactcaggaccagttgttaagagctctgtgtgtgtgtgtgtgtgtgtgtgagtgtacatgccaaagtgtgcctctctctcttgacccattatttcagacttaaaacaagcatgttttcaaatggcactatgagctgccaatgatgtatcaccaccatatctcattattctccagtaaatgtgataataatgtcatctgttaacataaaaaaagtttgacttcacaaaagcagctggaaatggacaaccacaatatgcataaatctaactcctaccatcagctacacactgcttgacatatattgttagaagcacctcgcatttgtgggttctcttaagcaaaatacttgcattaggtctcagctggggctgtgcatcaggcggtttgagaaatattcaattctcagcagaagccagaatttgaattccctcatcttttaggaatcatttaccaggtttggagaggattcagacagctcaggtgctttcactaatgtctctgaacttctgtccctctttgtgttcatggatagtccaataaataatgttatctttgaactgatgctcataggagagaatataagaactctgagtgatatcaacattagggattcaaagaaatattagatttaagctcacactggtcaaaaggaaccaagatacaaagaactctgagctgtcatcgtccccatctctgtgagccacaaccaacagcaggacccaacgcatgtctgagatccttaaatcaaggaaaccagtgtcatgagttgaattctcctattatggatgctagcttctggccatctctggctctcctcttgacacatattagcttctagcctttgcttccacgacttttatcttttctccaacacatcgcttaccaatcctctctctgctctgttgctttggacttccccacaagaatttcaacgactctcaagtcttttcttccatccccaccactaacctgaatgcctagacccttatttttattaatttccaatagatgctgcctatgggctatattgctttagatgaacattagatatttaaagctcaagaggttcaaaatccaactcattatcttctctttctttcacctccctgctcctctccctatattactgattgcactgaacagcatggtccccaatgtagccatgcaaatgagaaacccagtggctccttgtggtacatgcatgcaagactgctgaagccagaaggatgactgattacgcctcatgggtggaggggaccactcctgggccttcgtgattgtcaggagcaagacctgagatgctccctgccttcagtgtcctctgcatctcccctttctaatgaagatccatagaatttgctacatttgagaattccaattaggaactcacatgttttatctgccctatcaattttttaaacttgctgaaaattaagttttttcaaaatctgtccttgtaaattactttttcttacagtgtcttggcatactatatcaactttgattctttgttacaacttttcttactcttttatcaccaaagtggcttttattctctttattattattattttcttttactactatattacgttgttattattttgttctctatagtatcaatttatttgatttagtttcaatttatttttattgctgacttttaaaataagtgattcggggggtgggagaacaggggagggagagcattaggacaaatacctaatgcatgtgggacttaaaacctagatgatgggttgataggtgcagcaaaccactatggcacacgtatacctgtgtaacaaacctacacattctgcacatgtatcccagaacgtaaagtaaaatttaaaaaaaagtga

SEQ ID NO: 164 - DNA, 8488 bp, human organism
atgatgatgaacgtccccggcggaggagcggccgcggtgatgatgacgggctacaataatggtcgctgtccccggaattctctctacagtgactgcattattgaggagaagacggtggtcctgcagaaaaaagacaatgagggctttggattcgtgcttcgaggggccaaagctgacacacccattgaagaattcacaccaacaccggctttcccagccctacagtacctggagtccgtggatgaaggtggggtggcgtggcaagccggactaaggaccggggacttcttgattgaggttaacaatgagaatgttgtcaaagtcggccacaggcaggtggtgaacatgatccggcagggagggaatcacctggtccttaaggtggtcacggtgaccaggaatctggaccccgacgacaccgccaggaagaaagctcccccgcctccaaagcgggcaccgaccacagccctcaccctgcgctccaagtccatgacctcggagctggaggagctcgtggataaagataaacccgaggagatagtcccggcctccaagccctcccgcgctgctgagaacatggctgtggaaccgagggtggcgaccatcaagcagcggcccagcagccggtgcttcccggcgggctcagacatgaactctgtgtacgaacgccaaggaatcgccgtgatgacgcccactgttcctgggagcccaaaagccccgtttctgggcatccctcgaggtacgatgcgaaggcagaaatcaatagacagcagaatctttctatcaggaataacagaggaagagcggcagtttctggctcctccaatgctgaagttcaccagaagcctgtccatgccggacacctctgaggacatcccccctccaccgcagtctgtgcccccgtccccaccaccaccttccccaaccacttacaactgccccaagtccccaactccaagagtctacgggacgattaagcctgcgttcaatcagaattctgccgccaaggtgtcccccgccaccaggtccgacaccgtggccaccatgatgagggagaaggggatgtacttcaggagagagctggaccgctactccttggactctgaagacctctacagtcggaatgccggcccgcaagccaacttccgcaacaagagaggccagatgccagaaaacccatactcagaggtggggaagatcgccagcaaagccgtctacgtccccgccaagcccgccaggcggaaggggatgctggtgaagcagtccaacgtggaggacagccccgagaagacgtgctccatccctatcccgaccatcatcgtgaaggagccgtccaccagcagcagcggcaagagcagccagggcagcagcatggagatcgacccccaggccccggagccaccgagccagctgcggcctgacgaaagcctgaccgtcagcagcccctttgccgccgccatcgccggagccgtccgcgaccgtgagaagcggctggaagccaggaggaactccccggccttcctctccacagacctgggggatgaggatgtgggcctggggccacccgcccccaggacgcggccctccatgttccccgaggagggggattttgctgacgaggacagcgctgagcagctgtcatcccccatgccgagtgccacgcccagggagcccgaaaaccatttcgtgggtggcgccgaggccagtgctccgggtgaggctgggaggccgctgaattccacgtccaaagcccaggggcccgagagcagcccagcagtgccctccgcgagcagcggcacagccggccccgggaattatgtccacccactcacagggcggctgcttgatcccagctccccgctggccctggcactctccgcaagggaccgagccatgaaggagtctcaacagggacccaaaggggaggcccccaaggccgacctcaacaaacctctttacattgataccaaaatgcggcccagcctggatgccggcttccctacggtcaccaggcagaacacccggggacccctgaggcggcaggagacggagaacaagtacgagaccgacctgggccgagaccggaaaggcgatgacaagaagaacatgctgatcgacatcatggacacgtcccagcagaagtcggctggcctgctgatggtgcacaccgtggacgccactaagctggacaacgccctgcaggaagaggacgagaaggcagaggtggagatgaagccagacagctcgccgtccgaggtgccagaaggtgtttccgaaaccgaaggtgctttacagatctccgctgcccccgagcccaccaccgtgcccggcagaaccatcgtcgcggtgggctccatggaagaggcggtgattttgccattccgcatccctcctccccctctggcatccgtggacttggatgaggattttatttttacagagccattgcctcctcccctggaatttgcaaatagttttgatatccccgatgaccgggcagcttctgtcccggctctctcagacttagtgaagcagaagaaaagcgacacccctcagtccccttcgttgaactccagccaaccaaccaactctgcagacagcaagaagccagccagtctttcaaactgtctgcctgcctcattcctgccaccccctgaaagctttgacgccgtcgccgactctgggatcgaggaggtggacagccggagtagcagcgaccaccacctcgagacgaccagcactatctccaccgtgtctagcatctccaccctgtcttccgaaggtggagagaatgtggacacctgcacagtctatgcagatgggcaagcatttatggttgacaaacccccagtacctcctaagccaaaaatgaagcccatcattcacaaaagcaatgcactttatcaagacgcgctcgtggaagaagatgtagatagctttgttatccccccgcccgctcccccgcccccgccgggcagtgcccagcctgggatggccaaggttctccagccaaggacctccaagttgtggggcgacgtcacagagatcaaaagcccgattctctcaggcccaaaggcaaacgttattagtgaattgaactctatcctacagcaaatgaaccgagagaaattggcaaagccgggggaaggactggattcaccaatgggagccaagtccgccagcctcgctccaagaagcccggagatcatgagcaccatctcaggtacacggagcacgacggtcaccttcactgttcgccccggcacctcccagcccatcaccctgcagagccggccccccgactatgaaagcaggacctcaggaacaagacgtgccccaagccctgtggtctcgccaacagagatgaacaaagagaccctgcccgcccccctgtctgctgccaccgcctctccttctcccgctctctcagatgtctttagccttccaagccagcccccttctggggatctatttggcttgaacccagcgggacgcagtaggtcgccatccccctcgatactgcaacagccaatctcaaataagccttttacaactaaacctgtccacctgtggactaaaccagatgtggccgattggctggaaagtctaaacttgggtgaacataaagaggccttcatggacaatgagatcgatggcagtcacttaccaaacctgcagaaggaggacctcatcgatcttggggtaactcgagtcgggcacagaatgaacatagaaagggctttgaaacagctgctggacagataaggacggctgctctccacctcgcagactgctcttgttataagtagagatgggctcgtgctgaaacatctgaatgccaagcgaagtctgtgagcatcaaccccactccatgggtttgtctcctggtacccaaagaaatactgagttgtgtccacaacatggctgggtcttcagacccctggctcaccatgtgggtgtcttgggcagtttctatcacacatgggacaaggggagggagtttttctaacatggaaaaagattcccagcctgccgcccagcatgcaggtggcctcgctttgccgggtccgagaggctccccgtcaattttgcacgggatcctagctcttgtaggcagacaccagtgcactctagatacctcctgagacctccgtcctctgctttccgggcagctctcaccaccccaggccccggcatgaggcctttcctcagtcctgtggcctctcagaggacacctgatgctcacctgcccctctttctcctgcacttggcttgcagtgagatgctcccagatgcatttgtccagtgccccatcatgggcctgaaaggcagagaaactttttcctacacagattcttttccccatctcctcctgtggtttgcatccatggctctttggccatgaggttcctggcagtgctgggagtttggatgggatcgtgcccagctttgcttagctttctttatttctgcaaatctgttagcataattccaaggtggccaagcagatgtcacatggagttagtcaaagcacaaagtcacgattccacaatggaggggagacctggccaagggagccagccagcgtgcaactgcccaagctccaggtctccaggacaagagcagttgtctgccatgagcacccatccaggatggagaataagggcttctctgcctctcagaattctttttaattgaagatgtcttgagctctgcaaagatcagagcaggtgagcatccactttgacatgaaggacaagaagacgcatggctcatggcgggcacatgcggctgccagtgagacagcgtctcctctgggagctgggcgggcacagcatcctcagttctgtgcccagccaagggtgagcatctctgctgagacagtccttttgctctcggaggccagggaagatggtacttagaggcttttcccctatcgctctgggtgtctaggaatcccaccagcttgtcttaacagtacaacagcttctttgaggacccagtgggtatggagtatagacagaacccagggttgagaacagaaggtgggcggcaggatcagagtgaaagcagaggcgtgaggagaggaaagcagggaggtctcctgggctgccaggtcagcctctctggcaaggctttcttgagccccgcccctttctttccccggagtccctccaccccataacaatacctcgaatttccaaaagaggtcaccagatgcacatgggccgcaaaacacacagtcaggcttccagcacattctcccccatttggaggatactcgaatgtcaggtttttggttttattattatttcagaactagctcagcccatctctaattataaaacatggttttgttttttttttttcctttttttcttgattaggtctggaacagctctagaatgaacacataaaatttagcaatttaaaatctttctttactgcaagtttaaatagttgtacagatagtttataagcacaatattttaagaaaaaaaagtggctggtctactaggcagcctttgtgccacttcagtgctagaaagttaaagaaaaaaaaacttttgtgatttaataatactatttctgtggaataattataaaagtatgacctttttaaatcaaccttatttggatgcatctgaaccagcagagctgtgttatattttctatctttgctagaacttcgtcattgaaggacaatttcttcaaagtggttacaattcataatgcagcagtttctccaaaaacaaaaacaaaacacacaccacacacacgcgcttttccagtcacacacccctgatgttggaaccaagtttttggaccttctgttccaaaaccttttgcaggtcaatctttgtatttgaaatgatccaatccaacttgaagtcaattgaatattaaggcgctttacttccgtgtgctttcagtttttccatcatgagatgaatgagcattactctagataaatttcaagacaggatactacaggtggcctgctgaggctgccccatattttagaaaatgtaaaaatggtggtttggccattaatttgtcttccatttgatgataccgcaaaattccgtgagtccattcctttggcatggcactttccctgggcctacagttggtattacctctgtgctcagtgccaggcaaaacactagctcaaaggagagtcaaggaaaccgctggcagacgataaccagtcgaaactcgtgacttcggtttgttgaactttggcagccagttggtgagggccagatgttattccctttcttaaagatactccaagccacatgccactaaccacaagcaagctggctgcaagactaaagagctgataacatagtttatttttacactgtcttattatagagaagtaatagacctatcagaacctgcactgaccaacaaataaacacatgttgccaagatgaatcggtctctatctctatctgcttattttggtactgaaagcaatagttcctcattcaaatcaccacccactgttctccccctttgggacatgttaggacgaggccctattccatgcccctctttaatggtggaacaaatgttaaactgctcatctaaagatcatgttgatattattccaggttttaagatcaacttttgttacatactgtaatttaaataaactgcatttacatgcctagtttctgtaatattgtgtatacaaaacccaaatctctcaaaatgtaaattatgtatacctgccaagataccttttccagggtgtctgcgcacattttaagttaattcacataatataaaaattactcaatgtgactgttgatttgctgaactttacatatcacaaagtgaattatttgtgatactttagttaataaaatggtaaatttttttctcagttattgaacaagcaagcattatccagttgatctggcaatgactttttgtgtgtgggccacaatattgattttcccattaacaatttttttttgttttttaaatactaatatgtttcacactatagtttgtgtaacaacacgtgttcgcattatctatgttgctgttacttttgtgcttttattctttttagactttataaaaaaaaaaaaaagctcctgtaatttgcactttctcccaatccttaaatctcttgtatggcaaccaaaattactgtaaaaaaataaatatactattgcactaaggttgtggttctgattgcaaacaaacagtgaacactgtctgaattaaacaaaaagctgcccgacttgcaatctaatgtagattatctcaggcattgtggccagctctgcctctctaaaactgaccagaaaaatctctctcatcgagtaaacaggctcctgtcactgagctaatctgccttggttccatttccttattctcaatttatcaatggatacgtgcatgttatttcagaattatgcaaaacgtcaaaatctgcttctgtgaccgctgctataggcgtggagctgaggctcggcttttccttttgttctgggtggaagcagcggtgccgcggagggccagccagatccggacccttcccttagggtccagtctccccacaccccagcagggtgtcttctagccataaggccaagggagtggcagaactgggccgcctctctggttgacaagcaaaccacatgctaaggcttggagcaagagagaatttgtgtctattggcaaagaactaagccaggaagacatgggccatccctccgctttagggaagcatattttaaacctaaacgttgaacttcttctttggcctcaccagtgaaaacttgttgtctttagttcctaaagtttcttctactttggcacattccccagttgagcagcagcctctatgcttccacgttcaggaaaaattccagtcctcatatcttttgtagttcaccctcaagctctcccgcttcaccatccaatagtttctcccaaaccttggcacccccctagactttgcttccaatggtttcttccagaccacttttcctagatgaatatattcgtttaccttactaggaaaattattggaagattttttcttttacttgaaattggaggcattttaataactggcgaactggaatgtgtttctgtatttgtagacaaccatgtacccatgcaagtaggtgaacattccacagtggctgggtgaccacagcagctgcatgcagacaggactgcccgtgctttgtggggaatcagagaatttccaaacttgtttctcagacttccgcagatctcatcactttgatttctaatccatgctgtattggtgattttgtttatcgttcctgtaacttgttctacattccacagtctttaccgttttatgttcaaaattacaacaatccctgtccattgattccactctggaactctttgttcatgccaattttgaaattttaatacgagccttcaaataaacacagaaaagaaaaaaaaaaaaaaaaaaaaaaaa

SEQ ID NO: 165 - protein, 1254 aa, human organism
MMMNVPGGGAAAVMMTGYNNGRCPRNSLYSDCIIEEKTVVLQKKDNEGFGFVLRGAKADTPIEEFTPTPAFPALQYLESVDEGGVAWQAGLRTGDFLIEVNNENVVKVGHRQVVNMIRQGGNHLVLKVVTVTRNLDPDDTARKKAPPPPKRAPTTALTLRSKSMTSELEELVDKDKPEEIVPASKPSRAAENMAVEPRVATIKQRPSSRCFPAGSDMNSVYERQGIAVMTPTVPGSPKAPFLGIPRGTMRRQKSIDSRIFLSGITEEERQFLAPPMLKFTRSLSMPDTSEDIPPPPQSVPPSPPPPSPTTYNCPKSPTPRVYGTIKPAFNQNSAAKVSPATRSDTVATMMREKGMYFRRELDRYSLDSEDLYSRNAGPQANFRNKRGQMPENPYSEVGKIASKAVYVPAKPARRKGMLVKQSNVEDSPEKTCSIPIPTIIVKEPSTSSSGKSSQGSSMEIDPQAPEPPSQLRPDESLTVSSPFAAAIAGAVRDREKRLEARRNSPAFLSTDLGDEDVGLGPPAPRTRPSMFPEEGDFADEDSAEQLSSPMPSATPREPENHFVGGAEASAPGEAGRPLNSTSKAQGPESSPAVPSASSGTAGPGNYVHPLTGRLLDPSSPLALALSARDRAMKESQQGPKGEAPKADLNKPLYIDTKMRPSLDAGFPTVTRQNTRGPLRRQETENKYETDLGRDRKGDDKKNMLIDIMDTSQQKSAGLLMVHTVDATKLDNALQEEDEKAEVEMKPDSSPSEVPEGVSETEGALQISAAPEPTTVPGRTIVAVGSMEEAVILPFRIPPPPLASVDLDEDFIFTEPLPPPLEFANSFDIPDDRAASVPALSDLVKQKKSDTPQSPSLNSSQPTNSADSKKPASLSNCLPASFLPPPESFDAVADSGIEEVDSRSSSDHHLETTSTISTVSSISTLSSEGGENVDTCTVYADGQAFMVDKPPVPPKPKMKPIIHKSNALYQDALVEEDVDSFVIPPPAPPPPPGSAQPGMAKVLQPRTSKLWGDVTEIKSPILSGPKANVISELNSILQQMNREKLAKPGEGLDSPMGAKSASLAPRSPEIMSTISGTRSTTVTFTVRPGTSQPITLQSRPPDYESRTSGTRRAPSPVVSPTEMNKETLPAPLSAATASPSPALSDVFSLPSQPPSGDLFGLNPAGRSRSPSPSILQQPISNKPFTTKPVHLWTKPDVADWLESLNLGEHKEAFMDNEIDGSHLPNLQKEDLIDLGVTRVGHRMNIERALKQLLDR

SEQ ID NO: 166 - DNA, 2015 bp, human organism
actgcgaagcggcttcttcagagcacgggctggaactggcaggcaccgcgagcccctagcacccgacaagctgagtgtgcaggacgagtccccaccacacccacaccacagccgctgaatgaggcttccaggcgtccgctcgcggcccgcagagccccgccgtgggtccgcccgctgaggcgcccccagccagtgcgcttacctgccagactgcgcgccatggggcaacccgggaacggcagcgccttcttgctggcacccaatagaagccatgcgccggaccacgacgtcacgcagcaaagggacgaggtgtgggtggtgggcatgggcatcgtcatgtctctcatcgtcctggccatcgtgtttggcaatgtgctggtcatcacagccattgccaagttcgagcgtctgcagacggtcaccaactacttcatcacttcactggcctgtgctgatctggtcatgggcctggcagtggtgccctttggggccgcccatattcttatgaaaatgtggacttttggcaacttctggtgcgagttttggacttccattgatgtgctgtgcgtcacggccagcattgagaccctgtgcgtgatcgcagtggatcgctactttgccattacttcacctttcaagtaccagagcctgctgaccaagaataaggcccgggtgatcattctgatggtgtggattgtgtcaggccttacctccttcttgcccattcagatgcactggtaccgggccacccaccaggaagccatcaactgctatgccaatgagacctgctgtgacttcttcacgaaccaagcctatgccattgcctcttccatcgtgtccttctacgttcccctggtgatcatggtcttcgtctactccagggtctttcaggaggccaaaaggcagctccagaagattgacaaatctgagggccgcttccatgtccagaaccttagccaggtggagcaggatgggcggacggggcatggactccgcagatcttccaagttctgcttgaaggagcacaaagccctcaagacgttaggcatcatcatgggcactttcaccctctgctggctgcccttcttcatcgttaacattgtgcatgtgatccaggataacctcatccgtaaggaagtttacatcctcctaaattggataggctatgtcaattctggtttcaatccccttatctactgccggagcccagatttcaggattgccttccaggagcttctgtgcctgcgcaggtcttctttgaaggcctatgggaatggctactccagcaacggcaacacaggggagcagagtggatatcacgtggaacaggagaaagaaaataaactgctgtgtgaagacctcccaggcacggaagactttgtgggccatcaaggtactgtgcctagcgataacattgattcacaagggaggaattgtagtacaaatgactcactgctgtaaagcagtttttctacttttaaagacccccccccccccaacagaacactaaacagactatttaacttgagggtaataaacttagaataaaattgtaaaaattgtatagagatatgcagaaggaagggcatccttctgccttttttatttttttaagctgtaaaaagagagaaaacttatttgagtgattatttgttatttgtacagttcagttcctctttgcatggaatttgtaagtttatgtctaaagagctttagtcctagaggacctgagtctgctatattttcatgacttttccatgtatctacctcactattcaagtattaggggtaatatattgctgctggtaatttgtatctgaaggagattttccttcctacacccttggacttgaggattttgagtatctcggacctttcagctgtgaacatggactcttcccccactcctcttatttgctcacacggggtattttaggcagggatttgaggagcagcttcagttgttttcccgagcaaaggtctaaagtttacagtaaataaaatgtttgaccatg

SEQ ID NO: 167 - protein, 413 aa, human organism
MGQPGNGSAFLLAPNRSHAPDHDVTQQRDEVWVVGMGIVMSLIVLAIVFGNVLVITAIAKFERLQTVTNYFITSLACADLVMGLAVVPFGAAHILMKMWTFGNFWCEFWTSIDVLCVTASIETLCVIAVDRYFAITSPFKYQSLLTKNKARVIILMVWIVSGLTSFLPIQMHWYRATHQEAINCYANETCCDFFTNQAYAIASSIVSFYVPLVIMVFVYSRVFQEAKRQLQKIDKSEGRFHVQNLSQVEQDGRTGHGLRRSSKFCLKEHKALKTLGIIMGTFTLCWLPFFIVNIVHVIQDNLIRKEVYILLNWIGYVNSGFNPLIYCRSPDFRIAFQELLCLRRSSLKAYGNGYSSNGNTGEQSGYHVEQEKENKLLCEDLPGTEDFVGHQGTVPSDNIDSQGRNCSTNDSLL

SEQ ID NO: 168 - DNA, 3741 bp, human organism
gaattcgttgttgggaaggactggggaaacagctgtaacatttgccaccctcagaagctgctggtcctgtgtcacaccaccttagcctcttgatcgaggaagattctcgctgaagtctgttaattctactttttgagtacttatgaataaccacgtgtcttcaaaaccatctaccatgaagctaaaacataccatcaaccctattcttttatattttatacattttctaatatcactttatactattttaacatacattccgttttattttttctccgagtcaagacaagaaaaatcaaaccgaattaaagcaaagcctgtaaattcaaaacctgattctgcatacagatctgttaatagtttggatggtttggcttcagtattataccctggatgtgatactttagataaagtttttacatatgcaaaaaacaaatttaagaacaaaagactcttgggaacacgtgaagttttaaatgaggaagatgaagtacaaccaaatggaaaaatttttaaaaaggttattcttggacagtataattggctttcctatgaagatgtctttgttcgagcctttaattttggaaatggattacagatgttgggtcagaaaccaaagaccaacatcgccatcttctgtgagaccagggccgagtggatgatagctgcacaggcgtgttttatgtataattttcagcttgttacattatatgccactctaggaggtccagccattgttcatgcattaaatgaaacagaggtgaccaacatcattactagtaaagaactcttacaaacaaagttgaaggatatagtttctttggtcccacgcctgcggcacatcatcactgttgatggaaagccaccgacctggtccgacttccccaagggcatcattgtgcataccatggctgcagtggaggccctgggagccaaggccagcatggaaaaccaacctcatagcaaaccattgccctcagatattgcagtaatcatgtacacaagtggatccacaggacttccaaagggagtcatgatctcacatagtaacattattgctggtataactgggatggcagaaaggattccagaactaggagaggaagatgtctacattggatatttgcctctggcccatgttctagaattaagtgctgagcttgtctgtctttctcacggatgccgcattggttactcttcaccacagactttagcagatcagtcttcaaaaattaaaaaaggaagcaaaggggatacatccatgttgaaaccaacactgatggcagcagttccggaaatcatggatcggatctacaaaaatgtcatgaataaagtcagtgaaatgagtagttttcaacgtaatctgtttattctggcctataattacaaaatggaacagatttcaaaaggacgtaatactccactgtgcgacagctttgttttccggaaagttcgaagcttgctagggggaaatattcgtctcctgttgtgtggtggcgctccactttctgcaaccacgcagcgattcatgaacatctgtttctgctgtcctgttggtcagggatacgggctcactgaatctgctggggctggaacaatttccgaagtgtgggactacaatactggcagagtgggagcaccattagtttgctgtgaaatcaaattaaaaaactgggaggaaggtggatactttaatactgataagccacaccccaggggtgaaattcttattgggggccaaagtgtgacaatggggtactacaaaaatgaagcaaaaacaaaagctgatttctctgaagatgaaaatggacaaaggtggctctgtactggggatattggagagtttgaacccgatggatgcttaaagattattgatcgtaaaaaggaccttgtaaaactacaggcaggggaatatgtttctcttgggaaagtagaggcagctttgaagaatcttccactagtagataacatttgtgcatatgcaaacagttatcattcttatgtcattggatttgttgtgccaaatcaaaaggaactaactgaactagctcgaaagaaaggacttaaagggacttgggaggagctgtgtaacagttgtgaaatggaaaatgaggtacttaaagtgctttccgaagctgctatttcagcaagtctggaaaagtttgaaattccagtaaaaattcgtttgagtcctgaaccgtggacccctgaaactggtctggtgacagatgccttcaagctgaaacgcaaagagcttaaaacacattaccaggcggacattgagcgaatgtatggaagaaaataattattctcttctggcatcagtttgctacagtgagctcacatcaaataggaaaatacttgaaatgcatgtctcaagctgcaaggcaaactccattcctcatattaaactattacttctcatgacgtcaccatttttaactgacaggattagtaaaacattaagacagcaaacttgtgtctgtctcttctttcattttccccgccaccaacttactttaccacctatgactgtacttgtcagtatgagaatttttctgaatcatattggggaagcagtgattttaaaacctcaagtttttaaacatgatttatatgttctgtataatgttcagtttgtaactttttaaaagtttggatgtatagagggataaataggaaatataagaattggttatttgggggcttttttacttactgtatttaaaaatacaagggtattgatatgaaattatgtaaatttcaaatgcttatgaatcaaatcattgttgaacaaaagatttgttgctgtgtaattattgtcttgtatgcatttgagagaaataaatatacccatacttatgttttaagaagttgagatcttgtgaatatatgcctgtcagtgtcttctttatatatttattttttattagaaaaaatgaagtttggttggtgatgcatgaaacaaaatagcaagagagggttatagtttaatagtaagggagataacacagcatgtgtagcaccagttgataattggtctctagtagcttactgtcaaaatgttcaatgaagtcttctgttcatctgttgaaactaggaaaatacccaaacttaaatggaagaattctgaaagagaggatagaatttaaagaacaagagtatataaagttattctttgaatatttcgttgactatatgtacattgagttatctatatttgtaaacaaattagtcatggaaaattattctattccaaagtctccttttagtctagataatcattatttcattttaaaattagtgtttttcatagtttgcactgatgcgtgtatggatgtgtgtgagtcagtggtagcttatttaaaaagcaccttatcctttctcccataacctttgtacactaaaaaatgaaagaatttagaatgtatttgatgatagcattctcactaagacacatgagaatttaactttataaccgcgtgagttaagatttaattcataggttttgatgtcattgttgaagttatttgtaattcagaaaccttgcttgtgtgatacatagtaagtctcttcatttattactgcttgcctgttgttatatctggattatcaaaagcaatagtgcaccaattaagatgtgctcaaatcaggacttaaatcataggcaccacatttttcatgtcagactagttactttgttgattctcagttactgtaggcatcaaaaggcaaaaatca

SEQ ID NO: 169 - protein, 720 aa, human organism
MNNHVSSKPSTMKLKHTINPILLYFIHFLISLYTILTYIPFYFFSESRQEKSNRIKAKPVNSKPDSAYRSVNSLDGLASVLYPGCDTLDKVFTYAKNKFKNKRLLGTREVLNEEDEVQPNGKIFKKVILGQYNWLSYEDVFVRAFNFGNGLQMLGQKPKTNIAIFCETRAEWMIAAQACFMYNFQLVTLYATLGGPAIVHALNETEVTNIITSKELLQTKLKDIVSLVPRLRHIITVDGKPPTWSDFPKGIIVHTMAAVEALGAKASMENQPHSKPLPSDIAVIMYTSGSTGLPKGVMISHSNIIAGITGMAERIPELGEEDVYIGYLPLAHVLELSAELVCLSHGCRIGYSSPQTLADQSSKIKKGSKGDTSMLKPTLMAAVPEIMDRIYKNVMNKVSEMSSFQRNLFILAYNYKMEQISKGRNTPLCDSFVFRKVRSLLGGNIRLLLCGGAPLSATTQRFMNICFCCPVGQGYGLTESAGAGTISEVWDYNTGRVGAPLVCCEIKLKNWEEGGYFNTDKPHPRGEILIGGQSVTMGYYKNEAKTKADFSEDENGQRWLCTGDIGEFEPDGCLKIIDRKKDLVKLQAGEYVSLGKVEAALKNLPLVDNICAYANSYHSYVIGFVVPNQKELTELARKKGLKGTWEELCNSCEMENEVLKVLSEAAISASLEKFEIPVKIRLSPEPWTPETGLVTDAFKLKRKELKTHYQADIERMYGRK

SEQ ID NO: 170 - DNA, 4121 bp, human organism
agcaacgacgccgggcagcgggagcggcggccgcgccatgtggctgctggggccgctgtgcctgctgctgagcagcgccgcggagagccagctgctccccgggaacaacttcaccaatgagtgcaacataccaggcaacttcatgtgcagcaatggacggtgcatcccgggcgcctggcagtgtgacgggctgcctgactgcttcgacaagagtgatgagaaggagtgccccaaggctaagtcgaaatgtggcccaaccttcttcccctgtgccagcggcatccattgcatcattggtcgcttccggtgcaatgggtttgaggactgtcccgatggcagcgatgaagagaactgcacagcaaaccctctgctttgctccaccgcccgctaccactgcaagaacggcctctgtattgacaagagcttcatctgcgatggacagaataactgtcaagacaacagtgatgaggaaagctgtgaaagttctcaagaacccggcagtgggcaggtgtttgtgacttcagagaaccaacttgtgtattaccccagcatcacctatgccatcatcggcagctccgtcatttttgtgctggtggtggccctgctggcactggtcttgcaccaccagcggaagcggaacaacctcatgacgctgcccgtgcaccggctgcagcaccctgtgctgctgtcccgcctggtggtcctggaccacccccaccactgcaacgtcacctacaacgtcaataatggcatccagtatgtggccagccaggcggagcagaatgcgtcggaagtaggctccccaccctcctactccgaggccttgctggaccagaggcctgcgtggtatgaccttcctccaccgccctactcttctgacacggaatctctgaaccaagccgacctgcccccctaccgctcccggtccgggagtgccaacagtgccagctcccaggcagccagcagcctcctgagcgtggaagacaccagccacagcccggggcagcctggcccccaggagggcactgctgagcccagggactctgagcccagccagggcactgaagaagtataagtcccagttattccaaagtccatatgggttaatctgctctgacttgttgccattctaacaatttgtgctcatgggaagctctttaagcacctgtaaggatgtctcaagttacagtttgggatattaactatctctgcattcccctcctcccccagacttcagagatgtttttctggcgtctcagttgacatgatctgttgtgcgtcttttctgtcaggtcactcttcccttgggacccgagatcacaccctcatttttcacattattctgtttctgttggagagacagcatataaaacagtattgaaataggctgggagagagcaatgtttctgtgctatattggatgctcagaagtgcaggagacgctggacccaattctctctgctgggtagttaccttatagcatttggggatttgggttagatgatctaaccaggaggccatcactggatggtcacccccccaaaaaaattccatttgagcatcaaaacctgctttgcacaatcctatttgatgcccccagttcagcagagtcagtggccaaagaaaactttggacgtgagtaacacccttcagcagtcgcaacgttattttggttttgtgaaggactctgaaaccatctaccctgtataaattctggctttagaaatttgcccaagaatgctcattctgagagctttcctcagcagcatatatcatcagcctcatcctaaaataggcagggagcccctcccatgagtttatccaagttctcagctcctaaaatgcaggctgccaagaccctacacctgccctggctctacagccacttacctggtttctggactgtcaccctcccagctgacctgcccgtagccaaggaatgaggacctaacttgagttggcccaaagtctgacctggctgtatgtccctgtggcccacacccagcctgtcttgctcattcatgcagcctcaacactggcctccaaagttcccttaacacttgcaaagtcctttttacctgtgcatttggacttgaggacactggtttctatcacaggtgagagccatgttcaatacctccagcaagctctcctggctccctgcactgtgcacgctcctcttcccaaggtcccaataccagcacctctagttagagttagggtcagggtcaggcctctcccaacatcccagtagtttctcctctgagacacatgggcaagagacaatttggagtcaagattttccatttggatctattttaaatcttttagaaatgcatttgaaacagtgtgtttgttttttcccttctagttaagggactatttatatgtgtataggaaagctgtctctttttttgtttttcctttaacaaggtccaaagaaagatgcaaaaggagatcacacccttgccccgctgagccccgtgataacaagtcactccagactaacctgtgtgccagacatttgtgcattgttgcactttgaggttattatttatcaagttcttgaaggaagcagaaagagggactcctctctccctccgtgtatagtctctatgtttgtgctagtttttcttttttttctctgtgtccagtcagccacagggcccgcctccctgcaggaataaggggtaaaacgttaggtgttgtttggcaagaaaccacactgactgatgaggggtaaaatggaaccaggtagagccactccgggcagctgtcacccattcagaacttctttccgcagctgaagaaatgttcagtaacctgtttgacgctaattaaaacagagcctgcaggaagtggggctaaagtggcattcagtgatcctgttctgtagacttttctttctttttttaaccaaatccaaaggatgttacagaaaagctagccactggtattttgttttgtttaaaaaaaaaaagaaagaaagaaagaaagaaaaacggaaaggaacctagctgcctgtatctttcatttttaaaatagcacttgagttattttctgagtaatccaataaagaacttttgatgacagccagaatgtgttagaactctggctgaacatttcatctcctgtgagtcagaagggctttatttctccctttgatggggccccttcttctttctggtgctctggaagttgtttagaggaaagaattctaattttaattaattgcgcagtgagttaatctcactcgcttttctgcttccaggcatcttaggaaaaacaaatggttttagtagataagggatgcctactaatgcttttttaaaacaaacagggacatttttattatagatttgatttttttaatgaatgtttttaaaaatatataaataggacaccaaagcggcagggttttttttggggggagggggtttgttttccaactcaagatggcacattagtggccagcaatattttttaactcattccaaccaggaagcttttttatacattgcctaaatctacgccaaccagaaaatagtctcatctctttttttctcaaatgagatccgtgttttattttagcattaaattagttacactgtgatgactggcctattacctgactcagctccctctaccttgaaattgacatttttaaaaaatgcaactaagtggttaatagtgtgtgacgctcaaagttaatgtaaactggaaaggttgtgtgtcgttgctttttgtgttttggttaggcttggttttgttttttaatttttatactttctaataaatttgcagtttcattctttctgtttgtgcaaawggwmctamarmaammaaaaacawywttgggggggcttgggcctcggaaaaagtttttaacaccacttcgggtggggcggcggggcccacgtaggtacggcgaccacgcgggcccaaacgggaccccagaaggaaaccctggccaagaaaaaggtggcgagaattctccacaccagaaaaaaacgcgccgggggaaaccgcagagtgttgcgtaaaccacacccgaagagagaactcagaagcacacaagcgggactcaaccaggaggacccaagggaacccgatagagtacg

SEQ ID NO: 171 - protein, 345 aa, human organism
MWLLGPLCLLLSSAAESQLLPGNNFTNECNIPGNFMCSNGRCIPGAWQCDGLPDCFDKSDEKECPKAKSKCGPTFFPCASGIHCIIGRFRCNGFEDCPDGSDEENCTANPLLCSTARYHCKNGLCIDKSFICDGQNNCQDNSDEESCESSQEPGSGQVFVTSENQLVYYPSITYAIIGSSVIFVLVVALLALVLHHQRKRNNLMTLPVHRLQHPVLLSRLVVLDHPHHCNVTYNVNNGIQYVASQAEQNASEVGSPPSYSEALLDQRPAWYDLPPPPYSSDTESLNQADLPPYRSRSGSANSASSQAASSLLSVEDTSHSPGQPGPQEGTAEPRDSEPSQGTEEV

SEQ ID NO: 172 - DNA, 2479 bp, human organism
gtcatattgaacattccagatacctatcattactcgatgctgttgataacagcaagatggctttgaactcagggtcaccaccagctattggaccttactatgaaaaccatggataccaaccggaaaacccctatcccgcacagcccactgtggtccccactgtctacgaggtgcatccggctcagtactacccgtcccccgtgccccagtacgccccgagggtcctgacgcaggcttccaaccccgtcgtctgcacgcagcccaaatccccatccgggacagtgtgcacctcaaagactaagaaagcactgtgcatcaccttgaccctggggaccttcctcgtgggagctgcgctggccgctggcctactctggaagttcatgggcagcaagtgctccaactctgggatagagtgcgactcctcaggtacctgcatcaacccctctaactggtgtgatggcgtgtcacactgccccggcggggaggacgagaatcggtgtgttcgcctctacggaccaaacttcatccttcagatgtactcatctcagaggaagtcctggcaccctgtgtgccaagacgactggaacgagaactacgggcgggcggcctgcagggacatgggctataagaataatttttactctagccaaggaatagtggatgacagcggatccaccagctttatgaaactgaacacaagtgccggcaatgtcgatatctataaaaaactgtaccacagtgatgcctgttcttcaaaagcagtggtttctttacgctgtttagcctgcggggtcaacttgaactcaagccgccagagcaggatcgtgggcggtgagagcgcgctcccgggggcctggccctggcaggtcagcctgcacgtccagaacgtccacgtgtgcggaggctccatcatcacccccgagtggatcgtgacagccgcccactgcgtggaaaaacctcttaacaatccatggcattggacggcatttgcggggattttgagacaatctttcatgttctatggagccggataccaagtacaaaaagtgatttctcatccaaattatgactccaagaccaagaacaatgacattgcgctgatgaagctgcagaagcctctgactttcaacgacctagtgaaaccagtgtgtctgcccaacccaggcatgatgctgcagccagaacagctctgctggatttccgggtggggggccaccgaggagaaagggaagacctcagaagtgctgaacgctgccaaggtgcttctcattgagacacagagatgcaacagcagatatgtctatgacaacctgatcacaccagccatgatctgtgccggcttcctgcaggggaacgtcgattcttgccagggtgacagtggagggcctctggtcacttcgaacaacaatatctggtggctgataggggatacaagctggggttctggctgtgccaaagcttacagaccaggagtgtacgggaatgtgatggtattcacggactggatttatcgacaaatgaaggcaaacggctaatccacatggtcttcgtccttgacgtcgttttacaagaaaacaatggggctggttttgcttccccgtgcatgatttactcttagagatgattcagaggtcacttcatttttattaaacagtgaacttgtctggctttggcactctctgccatactgtgcaggctgcagtggctcccctgcccagcctgctctccctaaccccttgtccgcaaggggtgatggccggctggttgtgggcactggcggtcaattgtggaaggaagagggttggaggctgcccccattgagatcttcctgctgagtcctttccaggggccaattttggatgagcatggagctgtcacttctcagctgctggatgacttgagatgaaaaaggagagacatggaaagggagacagccaggtggcacctgcagcggctgccctctggggccacttggtagtgtccccagcctacttcacaaggggattttgctgatgggttcttagagccttagcagccctggatggtggccagaaataaagggaccagcccttcatgggtggtgacgtggtagtcacttgtaaggggaacagaaacatttttgttcttatggggtgagaatatagacagtgcccttggtgcgagggaagcaattgaaaaggaacttgccctgagcactcctggtgcaggtctccacctgcacattgggtggggctcctgggagggagactcagccttcctcctcatcctccctgaccctgctcctagcaccctggagagtgaatgccccttggtccctggcagggcgccaagtttggcaccatgtcggcctcttcaggcctgatagtcattggaaattgaggtccatgggggaaatcaaggatgctcagtttaaggtacactgtttccatgttatgtttctacacattgatggtggtgaccctgagttcaaagccatctt

SEQ ID NO: 173 - protein, 492 aa, human organism
MALNSGSPPAIGPYYENHGYQPENPYPAQPTVVPTVYEVHPAQYYPSPVPQYAPRVLTQASNPVVCTQPKSPSGTVCTSKTKKALCITLTLGTFLVGAALAAGLLWKFMGSKCSNSGIECDSSGTCINPSNWCDGVSHCPGGEDENRCVRLYGPNFILQMYSSQRKSWHPVCQDDWNENYGRAACRDMGYKNNFYSSQGIVDDSGSTSFMKLNTSAGNVDIYKKLYHSDACSSKAVVSLRCLACGVNLNSSRQSRIVGGESALPGAWPWQVSLHVQNVHVCGGSIITPEWIVTAAHCVEKPLNNPWHWTAFAGILRQSFMFYGAGYQVQKVISHPNYDSKTKNNDIALMKLQKPLTFNDLVKPVCLPNPGMMLQPEQLCWISGWGATEEKGKTSEVLNAAKVLLIETQRCNSRYVYDNLITPAMICAGFLQGNVDSCQGDSGGPLVTSNNNIWWLIGDTSWGSGCAKAYRPGVYGNVMVFTDWIYRQMKANG

SEQ ID NO: 174 - DNA, 3104 bp, human organism
  misc_feature (2539)..(2539): n is a, c, g, or t
  misc_feature (2967)..(2967): n is a, c, g, or t
  misc_feature (2979)..(2979): n is a, c, g, or t
  misc_feature (2989)..(2990): n is a, c, g, or t
  misc_feature (2993)..(2994): n is a, c, g, or t
  misc_feature (3006)..(3007): n is a, c, g, or t
  misc_feature (3015)..(3015): n is a, c, g, or t
  misc_feature (3027)..(3029): n is a, c, g, or t
  misc_feature (3040)..(3041): n is a, c, g, or t
  misc_feature (3054)..(3054): n is a, c, g, or t
cagagaggctgtatttcagtgcagcctgccagacctcttctggaggaagactggacaaagggggtcacacattccttccatacggttgagcctctacctgcctggtgctggtcacagttcagcttcttcatgatggtggatcccaatggcaatgaatccagtgctacatacttcatcctaataggcctccctggtttagaagaggctcagttctggttggccttcccattgtgctccctctaccttattgctgtgctaggtaacttgacaatcatctacattgtgcggactgagcacagcctgcatgagcccatgtatatatttctttgcatgctttcaggcattgacatcctcatctccacctcatccatgcccaaaatgctggccatcttctggttcaattccactaccatccagtttgatgcttgtctgctacagatgtttgccatccactccttatctggcatggaatccacagtgctgctggccatggcttttgaccgctatgtggccatctgtcacccactgcgccatgccacagtacttacgttgcctcgtgtcaccaaaattggtgtggctgctgtggtgcggggggctgcactgatggcaccccttcctgtcttcatcaagcagctgcccttctgccgctccaatatcctttcccattcctactgcctacaccaagatgtcatgaagctggcctgtgatgatatccgggtcaatgtcgtctatggccttatcgtcatcatctccgccattggcctggactcacttctcatctccttctcatatctgcttattcttaagactgtgttgggcttgacacgtgaagcccaggccaaggcatttggcacttgcgtctctcatgtgtgtgctgtgttcatattctatgtacctttcattggattgtccatggtgcatcgctttagcaagcggcgtgactctccactgcccgtcatcttggccaatatctatctgctggttcctcctgtgctcaacccaattgtctatggagtgaagacaaaggagattcgacagcgcatccttcgacttttccatgtggccacacacgcttcagagccctaggtgtcagtgatcaaacttcttttccattcagagtcctctgattcagattttaatgttaacattttggaagacagtattcagaaaaaaaatttccttaataaaaatacaactcagatccttcaaatatgaaactggttggggaatctccattttttcaatattattttcttctttgttttcttgctacatataattattaataccctgactaggttgtggttggagggttattacttttcattttaccatgcagtccaaatctaaactgcttctactgatggtttacagcattctgagataagaatggtacatctagagaacatttgccaaaggcctaagcacagcaaaggaaaataaacacagaatataataaaatgagataatctagcttaaaactataacttcctcttcagaactcccaaccacattggatctcagaaaaatactgtcttcaaaatgacttctacagagaagaaataatttttcctctggacactagcacttaaggggaagattggaagtaaagccttgaaaagagtacatttacctacgttaatgaaagttgacacactgttctgagagttttcacagcatatggaccctgtttttcctatttaattttcttatcaaccctttaattaggcaaagatattattagtaccctcattgtagccatgggaaaattgatgttcagtggggatcagtgaattaaatggggtcatacaagtataaaaattaaaaaaaaaagacttcatgcccaatctcatatgatgtggaagaactgttaaagagaccaacagggtagtgggttagagatttccagagtcttacattttctaraggaggtatttaatttcttctcactcatccagtgttgtatttaggaatttcctggcaacagaactcatggctttaatcccactagctattgcttattgtcctggtccaattgccaattacctgtgtcttggaagaagtgatttctaggttcaccattatggaagattcttattcagaaagtctgcatagggcttatagcaagttatttatttttaaaagttccataggtgtttctgataggcagtgaggttagggagccaccagttatgatgggaagtatggaatggcaggtgttgaagataacattggccttttgagtgtgactcgtagctggaaagtgagggaatcttcaggaccatgctttatttggggctttgtgcagtatggaacagggactttgagaccgggaaagcaatctgacttaggcatgggaatcaggcatttttgcttctgaggggctattaccaagggttaataggtttcatcttcaacaggatatgacaacagtcttaaccaagaaactcaaattacatatactaaaacatgtgatcatatatgtggtaagtttcattttctttttcaatcctcaggttccctgatatggattcctatnacatgctttcatccccttttgtaatggatatcatatttggaaatgcctatttaatacttgtatttgctgctggactgtaagcccatgagggcactgtttattattgaatgtcatctctgttcatcattgactgctctttgctcatcattgaatcccccagcaaagtgcctagaacataatagtgcttatgcttgacaccggttatttttcatcaaacctgattccttctgtgctgaacacatagccaggcaattttccagccttctttgagttgggtattattaaattttagccattacttccaatgtgagtggaagtgacatgtgcaatttttatacctggctcataaaaccctcccatgtgcagcctttcatgttgacattaaatgtgacttgggaagctatgtgttacacagagttaattaaccngaaaggcctggnaattttttgnnaannaaactgtggccnngaggcccncaaccctttttnnnaatttggcaanntcccactttgtantttggtaaggaggccagttggataagtgaaaaataaagtactattgtgtc

SEQ ID NO: 175 - protein, 317 aa, human organism
MVDPNGNESSATYFILIGLPGLEEAQFWLAFPLCSLYLIAVLGNLTIIYIVRTEHSLHEPMYIFLCMLSGIDILISTSSMPKMLAIFWFNSTTIQFDACLLQMFAIHSLSGMESTVLLAMAFDRYVAICHPLRHATVLTLPRVTKIGVAAVVRGAALMAPLPVFIKQLPFCRSNILSHSYCLHQDVMKLACDDIRVNVVYGLIVIISAIGLDSLLISFSYLLILKTVLGLTREAQAKAFGTCVSHVCAVFIFYVPFIGLSMVHRFSKRRDSPLPVILANIYLLVPPVLNPIVYGVKTKEIRQRILRLFHVATHASEP

SEQ ID NO: 176 - DNA, 2834 bp, human organism
tcggagcctgcggagggtggtggtggtggtggtggtggccctcgcccgcctcactcatgcctcctcctcctctgctctcgctcaggcgcctcggtggcggttggtcggcggttacgcggctggtggtcgcggcggccggggctcgctctcggggaggccggggcggatctcgcggcgcaggcggcggcggccgaggtggggtcgcgcggcggaggcggctcgagcttcgtgctgcgcgctcgctcttgggctcctcgctgcaggaggagtgtgactatgtgcagatgatcgaggtgcagcacaagcagtgcctggaggaggcccagctggagaatgagacaataggctgcagcaagatgtgggacaacctcacctgctggccagccacccctcggggccaggtagttgtcttggcctgtcccctcatcttcaagctcttctcctccattcaaggccgcaatgtaagccgcagctgcaccgacgaaggctggacgcacctggagcctggcccgtaccccattgcctgtggtttggatgacaaggcagcgagtttggatgagcagcagaccatgttctacggttctgtgaagaccggctacaccattggctacggcctgtccctcgccacccttctggtcgccacagctatcctgagcctgttcaggaagctccactgcacgcggaactacatccacatgcacctcttcatatccttcatcctgagggctgccgctgtcttcatcaaagacttggccctcttcgacagcggggagtcggaccagtgctccgagggctcggtgggctgtaaggcagccatggtctttttccaatattgtgtcatggctaacttcttctggctgctggtggagggcctctacctgtacaccctgcttgccgtctccttcttctctgagcggaagtacttctgggggtacatactcatcggctggggggtacccagcacattcaccatggtgtggaccatcgccaggatccattttgaggattatggtctgctcaggtgctgggacaccatcaactcctcactgtggtggatcataaagggccccatcctcacctccatcttggtaaacttcatcctgtttatttgcatcatccgaatcctgcttcagaaactgcggcccccagatatcaggaagagtgacagcagtccatactcaaggctagccaggtccacactcctgctgatccccctgtttggagtacactacatcatgttcgccttctttccggacaattttaagcctgaagtgaagatggtctttgagctcgtcgtggggtctttccagggttttgtggtggctatcctctactgcttcctcaatggtgaggtgcaggcggagctgaggcggaagtggcggcgctggcacctgcagggcgtcctgggctggaaccccaaataccggcacccgtcgggaggcagcaacggcgccacgtgcagcacgcaggtttccatgctgacccgcgtcagcccaggtgcccgccgctcctccagcttccaagccgaagtctccctggtctgaccaccaggatcccagcccaagcggcccctcccgccccttcccactcgcagcagacgccggggacagaggcctgcccgggcgcgccagccccggccctgggctcggaggctgcccccggccccctggtctctggtccggacactcctagagaacgcagccctagagcctgcctggagcgtttctagcaagtgagagagatgggagctcctctcctggaggatgcaggtggaactcagtcattagactcctcctccaaaggccccctacgccaatcaagggcaaaaagtctacatactttcatcctgactctgccccctgctggctcttctgcccaattggaggaaagcaaccggtggatcctcaaacaacactggtgtgacctgagggcagaaaggttctgcccgggaaggtcaccagcaccaacaccacggtagtgcctgaaatttcaccattgctgtcaagttcctttgggttaagcattaccactcaggcatttgactgaagatgcagctcactaccctattctctctttacgcttagttatcagctttttaaagtgggttattctggagtttttgtttggagagcacacctatcttagtggttccccaccgaagtggactggcccctgggtcagtctggtgggaggacggtgcaacccaaggactgagggactctgaagcctctgggaaatgagaaggcagccaccagcgaatgctaggtctcggactaagcctacctgctctccaagtctcagtggcttcatctgtcaagtgggactctgtcacaccagccattcttatctctctgtgctgtggaagcaacaggaatcaagagactgccctccttgtccacccacctatgtgccaactgttgtaactaggctcagagatgtgcacccatgggctctgacagaaagcagatcctcaccctgctacacatacaggatttgaactcagatctgtctgataggaatgtgaaagcacggactcttactgctaacttttgtgtatcgtaaccagccagatcctcttggttatttgtttaccacttgtattattaatgccattatccctgaattccccttgccaccccaccctccctggagtgtggctgaggaggcctccatctcatgtatcatctggataggagcctgctggtcacagcctcctctgtctgcccttcaccccagtggccactcagcttcctacccacacctctgccagaagatcccctcaggactgcaacaggcttgtgcaacaataaatgttggcttggaaaaaaaaaaaa

SEQ ID NO: 177 - protein, 495 aa, human organism
MPPPPLLSLRRLGGGWSAVTRLVVAAAGARSRGGRGGSRGAGGGGRGGVARRRRLELRAARSLLGSSLQEECDYVQMIEVQHKQCLEEAQLENETIGCSKMWDNLTCWPATPRGQVVVLACPLIFKLFSSIQGRNVSRSCTDEGWTHLEPGPYPIACGLDDKAASLDEQQTMFYGSVKTGYTIGYGLSLATLLVATAILSLFRKLHCTRNYIHMHLFISFILRAAAVFIKDLALFDSGESDQCSEGSVGCKAAMVFFQYCVMANFFWLLVEGLYLYTLLAVSFFSERKYFWGYILIGWGVPSTFTMVWTIARIHFEDYGLLRCWDTINSSLWWIIKGPILTSILVNFILFICIIRILLQKLRPPDIRKSDSSPYSRLARSTLLLIPLFGVHYIMFAFFPDNFKPEVKMVFELVVGSFQGFVVAILYCFLNGEVQAELRRKWRRWHLQGVLGWNPKYRHPSGGSNGATCSTQVSMLTRVSPGARRSSSFQAEVSLV

SEQ ID NO: 178 - DNA, 2070 bp, human organism
atgagcggtgcgggggtggcggctgggacgcggccccccagctcgccgaccccgggctctcggcgccggcgccagcgcccctctgtgggcgtccagtccttgaggccgcagagcccgcagctcaggcagagcgacccgcagaaacggaacctggacctggagaaaagcctgcagttcctgcagcagcagcactcggagatgctggccaagctccatgaggagatcgagcatctgaagcgggaaaacaagggtgagccggcgcggggccctaggccggccctgcctccccaggcacactcaacactgccgctcccgcagcacagaaacacagccatcaactccagcacacgcctgggctcagggggaacacaggacggggagcccctccagactgtccttgcccacctggctgcactggcccctgtatgccaacccagtgggtacaggttctgggggacctggacagatgccgctacctctagccgtggctggacgatgttatgcagccaagcacagcacgtgctgctctcgggaagcccagggcctgaggtcattgcagggcggcaggtggccacagggtgctccccagacctccctcctccaagtagagctgaaatgggaaggaacccctgggacagcccctgccctgctagatctttgcctcagattgctgctgtggccaggcccaggatttccagccctatggctctgagtcctcacatgctgggggcccaggggatatggacacactccatccagggatcccttcctgccatctgggcagcaaccatggggacaaagggaggaagcagagtcctgtttccttgccacttgtccaaggcacttccccatcctgacagcggcccccacccagcccaggatcctgggctgtggtctcaagctcacttcccattatctttggggctggggctgacatcaggaggacatctgactggtggatggagccagcctgggaacatcgcagctggggcagtgcctagggctctcccttcccagggagacatggagaagggggttgagggagggcccttccctagccgctgtggcaactccagtgagctgttctgggcaaagtgtggcccaagtcggcagccccagccctgcagtgctggggacgctgacaggacacgggaagaggccatgctttccctcgggacctgctgttccatgtgtcccaagccctcctgctttccagatggcccctcaggaaaccacctttccagggcctctgctcccttgggcgctcgctgggtctgcatcaacggagtgtgggtagagccgggaggacccagccctgccaggctgaaggagggctcctcacggacacacaggccaggaggcaagcgtgggcgtcttgcgggcggtagcgccgacactgtgcgctctcctgcagacagcctctccatgtcaagcttccagtctgtcaagtccatctctaattcagccaactctcaaggcaaggccaggccccagcccggctccttcaacaagcaagattcaaaagctgacgtctcccagaaggcggacctggaagaggagcccctacttcacaacagcaagctggacaaagttcctggggtacaagggcaggccagaaaggagaaagcagaggcctctaatgcaggagctgcctgtatggggaacagccagcaccagggcaggcagatgggggcgggggcacaccccccaatgatcctgccccttcccctgcgaaagcccaccacacttaggcagtgcgaagtgctcatccgcgagctgtggaataccaacctcctgcagacccaagagctgcggcacctcaagtccctcctggaagggagccagaggccccaggcagccccggaggaagctagctttcccagggaccaagaagccacgcatttccccaaggtctccaccaagagcctctccaagaaatgcctgagcccacctgtggcggagcgtgccatcctgcccgcactgaagcagaccccgaagaacaactttgccgagaggcagaagaggctgcaggcaatgcagaaacggcgcctgcatcgctcagtgctttga

SEQ ID NO: 179 - protein, 689 aa, human organism [sequence omitted]

SEQ ID NO: 180 - DNA, 3461 bp, human organism
ctcgtgccgaattcggcacgagaccgcgtgttcgcgcctggtagagatttctcgaagacaccagtgggcccgtgtggaaccaaacctgcgcgcgtggccgggccgtgggacaacgaggccgcggagacgaaggcgcaatggcgaggaagttatctgtaatcttgatcctgacctttgccctctctgtcacaaatccccttcatgaactaaaagcagctgctttcccccagaccactgagaaaattagtccgaattgggaatctggcattaatgttgacttggcaatttccacacggcaatatcatctacaacagcttttctaccgctatggagaaaataattctttgtcagttgaagggttcagaaaattacttcaaaatataggcatagataagattaaaagaatccatatacaccatgaccacgaccatcactcagaccacgagcatcactcagaccatgagcgtcactcagaccatgagcatcactcagaccacgagcatcactctgaccatgatcatcactctcaccataatcatgctgcttctggtaaaaataagcgaaaagctctttgcccagaccatgactcagatagttcaggtaaagatcctagaaacagccaggggaaaggagctcaccgaccagaacatgccagtggtagaaggaatgtcaaggacagtgttagtgctagtgaagtgacctcaactgtgtacaacactgtctctgaaggaactcactttctagagacaatagagactccaagacctggaaaactcttccccaaagatgtaagcagctccactccacccagtgtcacatcaaagagccgggtgagccggctggctggtaggaaaacaaatgaatctgtgagtgagccccgaaaaggctttatgtattccagaaacacaaatgaaaatcctcaggagtgtttcaatgcatcaaagctactgacatctcatggcatgggcatccaggttccgctgaatgcaacagagttcaactatctctgtccagccatcatcaaccaaattgatgctagatcttgtctgattcatacaagtgaaaagaaggctgaaatccctccaaagacctattcattacaaatagcctgggttggtggttttatagccatttccatcatcagtttcctgtctctgctgggggttatcttagtgcctctcatgaatcgggtgtttttcaaatttctcctgagtttccttgtggcactggccgttgggactttgagtggtgatgcttttttacaccttcttccacattctcatgcaagtcaccaccatagtcatagccatgaagaaccagcaatggaaatgaaaagaggaccacttttcagtcatctgtcttctcaaaacatagaagaaagtgcctattttgattccacgtggaagggtctaacagctctaggaggcctgtatttcatgtttcttgttgaacatgtcctcacattgatcaaacaatttaaagataagaagaaaaagaatcagaagaaacctgaaaatgatgatgatgtggagattaagaagcagttgtccaagtatgaatctcaactttcaacaaatgaggagaaagtagatacagatgatcgaactgaaggctatttacgagcagactcacaagagccctcccactttgattctcagcagcctgcagtcttggaagaagaagaggtcatgatagctcatgctcatccacaggaagtctacaatgaatatgtacccagagggtgcaagaataaatgccattcacatttccacgatacactcggccagtcagacgatctcattcaccaccatcatgactaccatcatattctccatcatcaccaccaccaaaaccaccatcctcacagtcacagccagcgctactctcgggaggagctgaaagatgccggcgtcgccactttggcctggatggtgataatgggtgatggcctgcacaatttcagcgatggcctagcaattggtgctgcttttactgaaggcttatcaagtggtttaagtacttctgttgctgtgttctgtcatgagttgcctcatgaattaggtgactttgctgttctactaaaggctggcatgaccgttaagcaggctgtcctttataatgcattgtcagccatgctggcgtatcttggaatggcaacaggaattttcattggtcattatgctgaaaatgtttctatgtggatatttgcacttactgctggcttattcatgtatgttgctctggttgatatggtacctgaaatgctgcacaatgatgctagtgaccatggatgtagccgctgggggtatttctttttacagaatgctgggatgcttttgggttttggaattatgttacttatttccatatttgaacataaaatcgtgtttcgtataaatttctagttaaggtttaaatgctagagtagcttaaaaagttgtcatagtttcagtaggtcatagggagatgagtttgtatgctgtactatgcagcgtttaaagttagtgggttttgtgatttttgtattgaatattgctgtctgttacaaagtcagttaaaggtacgttttaatatttaagttattctatcttggagataaaatctgtatgtgcaattcaccggtattaccagtttattatgtaaacaagagatttggcatgacatgttctgtatgtttcagggaaaaatgtctttaatgctttttcaagaactaacacagttattcctatactggattttaggtctctgaagaactgctggtgtttaggaataagaatgtgcatgaagcctaaaataccaagaaagcttatactgaatttaagcaaagaaataaaggagaaaagagaagaatctgagaattggggaggcatagattcttataaaaatcacaaaatttgttgtaaattagaggggagaaatttagaattaagtataaaaaggcagaattagtatagagtacattcattaaacatttttgtcaggattatttcccgtaaaaacgtagtgagcactctcatatactaattagtgtacatttaactttgtataatacagaaatctaaatatatttaatgaattcaagcaatatacacttgaccaagaaattggaatttcaaaatgttcgtgcgggttatataccagatgagtacagtgagtagtttatgtatcaccagactgggttattgccaagttatatatcaccaaaagctgtatgactggatgttctggttacctggtttacaaaattatcagagtagtaaaactttgatatatatgaggatattaaaactacactaagtatcatttgattcgattcagaaagtactttgatatctctcagtgcttcagtgctatcattgtgagcaattgtctttatatacggtactgtagccatactaggcctgtctgtggcattctctagatgtttcttttttacacaataaattccttatatcagcttg

SEQ ID NO: 181 - protein, 755 aa, human organism
MARKLSVILILTFALSVTNPLHELKAAAFPQTTEKISPNWESGINVDLAISTRQYHLQQLFYRYGENNSLSVEGFRKLLQNIGIDKIKRIHIHHDHDHHSDHEHHSDHERHSDHEHHSDHEHHSDHDHHSHHNHAASGKNKRKALCPDHDSDSSGKDPRNSQGKGAHRPEHASGRRNVKDSVSASEVTSTVYNTVSEGTHFLETIETPRPGKLFPKDVSSSTPPSVTSKSRVSRLAGRKTNESVSEPRKGFMYSRNTNENPQECFNASKLLTSHGMGIQVPLNATEFNYLCPAIINQIDARSCLIHTSEKKAEIPPKTYSLQIAWVGGFIAISIISFLSLLGVILVPLMNRVFFKFLLSFLVALAVGTLSGDAFLHLLPHSHASHHHSHSHEEPAMEMKRGPLFSHLSSQNIEESAYFDSTWKGLTALGGLYFMFLVEHVLTLIKQFKDKKKKNQKKPENDDDVEIKKQLSKYESQLSTNEEKVDTDDRTEGYLRADSQEPSHFDSQQPAVLEEEEVMIAHAHPQEVYNEYVPRGCKNKCHSHFHDTLGQSDDLIHHHHDYHHILHHHHHQNHHPHSHSQRYSREELKDAGVATLAWMVIMGDGLHNFSDGLAIGAAFTEGLSSGLSTSVAVFCHELPHELGDFAVLLKAGMTVKQAVLYNALSAMLAYLGMATGIFIGHYAENVSMWIFALTAGLFMYVALVDMVPEMLHNDASDHGCSRWGYFFLQNAGMLLGFGIMLLISIFEHKIVFRINF

SEQ ID NO: 182 - DNA, 2032 bp, human organism
cgcggggcgcggagtcggcggggcctcgcgggacgcgggcagtgcggagaccgcggcgctgaggacgcgggagccgggagcgcacgcgcggggtggagttcagcctactctttcttagatgtgaaaggaaaggaagatcatttcatgccttgttgataaaggttcagacttctgctgattcataaccatttggctctgagctatgacaagagaggaaacaaaaagttaaacttacaagcctgccataagtgagaagcaaacttccttgataacatgcttttgcgaagtgcaggaaaattaaatgtgggcaccaagaaagaggatggtgagagtacagcccccaccccccgtccaaaggtcttgcgttgtaaatgccaccaccattgtccagaagactcagtcaacaatatttgcagcacagacggatattgtttcacgatgatagaagaggatgactctgggttgcctgtggtcacttctggttgcctaggactagaaggctcagattttcagtgtcgggacactcccattcctcatcaaagaagatcaattgaatgctgcacagaaaggaacgaatgtaataaagacctacaccctacactgcctccattgaaaaacagagattttgttgatggacctatacaccacagggctttacttatatctgtgactgtctgtagtttgctcttggtccttatcatattattttgttacttccggtataaaagacaagaaaccagacctcgatacagcattgggttagaacaggatgaaacttacattcctcctggagaatccctgagagacttaattgagcagtctcagagctcaggaagtggatcaggcctccctctgctggtccaaaggactatagctaagcagattcagatggtgaaacagattggaaaaggtcgctatggggaagtttggatgggaaagtggcgtggcgaaaaggtagctgtgaaagtgttcttcaccacagaggaagccagctggttcagagagacagaaatatatcagacagtgttgatgaggcatgaaaacattttgggtttcattgctgcagatatcaaagggacagggtcctggacccagttgtacctaatcacagactatcatgaaaatggttccctttatgattatctgaagtccaccaccctagacgctaaatcaatgctgaagttagcctactcttctgtcagtggcttatgtcatttacacacagaaatctttagtactcaaggcaaaccagcaattgcccatcgagatctgaaaagtaaaaacattctggtgaagaaaaatggaacttgctgtattgctgacctgggcctggctgttaaatttattagtgatacaaatgaagttgacataccacctaacactcgagttggcaccaaacgctatatgcctccagaagtgttggacgagagcttgaacagaaatcacttccagtcttacatcatggctgacatgtatagttttggcctcatcctttgggaggttgctaggagatgtgtatcaggaggtatagtggaagaataccagcttccttatcatgacctagtgcccagtgacccctcttatgaggacatgagggagattgtgtgcatcaagaagttacgcccctcattcccaaaccggtggagcagtgatgagtgtctaaggcagatgggaaaactcatgacagaatgctgggctcacaatcctgcatcaaggctgacagccctgcgggttaagaaaacacttgccaaaatgtcagagtcccaggacattaaactctgataggagaggaaaagtaagcatctctgcagaaagccaacaggtactcttctgtttgtgggcagagcaaaagacatcaaataagcatccacagtacaagccttgaacatcgtcctgcttcccagtgggttcagacctcacctttcagggagcgacctgggcaaagacagagaagctcccagaaggagagattgatccgtgtctgtttgtaggcggagaaaccgttgggtaacttgttcaagatatgatgcat

SEQ ID NO: 183 - protein, 502 aa, human organism
MLLRSAGKLNVGTKKEDGESTAPTPRPKVLRCKCHHHCPEDSVNNICSTDGYCFTMIEEDDSGLPVVTSGCLGLEGSDFQCRDTPIPHQRRSIECCTERNECNKDLHPTLPPLKNRDFVDGPIHHRALLISVTVCSLLLVLIILFCYFRYKRQETRPRYSIGLEQDETYIPPGESLRDLIEQSQSSGSGSGLPLLVQRTIAKQIQMVKQIGKGRYGEVWMGKWRGEKVAVKVFFTTEEASWFRETEIYQTVLMRHENILGFIAADIKGTGSWTQLYLITDYHENGSLYDYLKSTTLDAKSMLKLAYSSVSGLCHLHTEIFSTQGKPAIAHRDLKSKNILVKKNGTCCIADLGLAVKFISDTNEVDIPPNTRVGTKRYMPPEVLDESLNRNHFQSYIMADMYSFGLILWEVARRCVSGGIVEEYQLPYHDLVPSDPSYEDMREIVCIKKLRPSFPNRWSSDECLRQMGKLMTECWAHNPASRLTALRVKKTLAKMSESQDIKL

SEQ ID NO: 184 - DNA, 3375 bp, human organism
gacagtgttcgcggctgcaccgctcggaggctgggtgacccgcgtagaagtgaagtacttttttatttgcagacctgggccgatgccgctttaaaaaacgcgaggggctctatgcacctccctggcggtagttcctccgacctcagccgggtcgggtcgtgccgccctctcccaggagagacaaacaggtgtcccacgtggcagccgcgccccgggcgcccctcctgtgatcccgtagcgccccctggcccgagccgcgcccgggtctgtgagtagagccgcccgggcaccgagcgctggtcgccgctctccttccgttatatcaacatgccccctttcctgttgctggaggccgtctgtgttttcctgttttccagagtgcccccatctctccctctccaggaagtccatgtaagcaaagaaaccatcgggaagatttcagctgccagcaaaatgatgtggtgctcggctgcagtggacatcatgtttctgttagatgggtctaacagcgtcgggaaagggagctttgaaaggtccaagcactttgccatcacagtctgtgacggtctggacatcagccccgagagggtcagagtgggagcattccagttcagttccactcctcatctggaattccccttggattcattttcaacccaacaggaagtgaaggcaagaatcaagaggatggttttcaaaggagggcgcacggagacggaacttgctctgaaataccttctgcacagagggttgcctggaggcagaaatgcttctgtgccccagatcctcatcatcgtcactgatgggaagtcccagggggatgtggcactgccatccaagcagctgaaggaaaggggtgtcactgtgtttgctgtgggggtcaggtttcccaggtgggaggagctgcatgcactggccagcgagcctagagggcagcacgtgctgttggctgagcaggtggaggatgccaccaacggcctcttcagcaccctcagcagctcggccatctgctccagcgccacgccagactgcagggtcgaggctcacccctgtgagcacaggacgctggagatggtccgggagttcgctggcaatgccccatgctggagaggatcgcggcggacccttgcggtgctggctgcacactgtcccttctacagctggaagagagtgttcctaacccaccctgccacctgctacaggaccacctgcccaggcccctgtgactcgcagccctgccagaatggaggcacatgtgttccagaaggactggacggctaccagtgcctctgcccgctggcctttggaggggaggctaactgtgccctgaagctgagcctggaatgcagggtcgacctcctcttcctgctggacagctctgcgggcaccactctggacggcttcctgcgggccaaagtcttcgtgaagcggtttgtgcgggccgtgctgagcgaggactctcgggcccgagtgggtgtggccacatacagcagggagctgctggtggcggtgcctgtgggggagtaccaggatgtgcctgacctggtctggagcctcgatggcattcccttccgtggtggccccaccctgacgggcagtgccttgcggcaggcggcagagcgtggcttcgggagcgccaccaggacaggccaggaccggccacgtagagtggtggttttgctcactgagtcacactccgaggatgaggttgcgggcccagcgcgtcacgcaagggcgcgagagctgctcctgctgggtgtaggcagtgaggccgtgcgggcagagctggaggagatcacaggcagcccaaagcatgtgatggtctactcggatcctcaggatctgttcaaccaaatccctgagctgcaggggaagctgtgcagccggcagcggccagggtgccggacacaagccctggacctcgtcttcatgttggacacctctgcctcagtagggcccgagaattttgctcagatgcagagctttgtgagaagctgtgccctccagtttgaggtgaaccctgacgtgacacaggtcggcctggtggtgtatggcagccaggtgcagactgccttcgggctggacaccaaacccacccgggctgcgatgctgcgggccattagccaggccccctacctaggtggggtgggctcagccggcaccgccctgctgcacatctatgacaaagtgatgaccgtccagaggggtgcccggcctggtgtccccaaagctgtggtggtgctcacaggcgggagaggcgcagaggatgcagccgttcctgcccagaagctgaggaacaatggcatctctgtcttggtcgtgggcgtggggcctgtcctaagtgagggtctgcggaggcttgcaggtccccgggattccctgatccacgtggcagcttacgccgacctgcggtaccaccaggacgtgctcattgagtggctgtgtggagaagccaagcagccagtcaacctctgcaaacccagcccgtgcatgaatgagggcagctgcgtcctgcagaatgggagctaccgctgcaagtgtcgggatggctgggagggcccccactgcgagaaccgtgagtggagctcttgctctgtatgtgtgagccagggatggattcttgagacgcccctgaggcacatggctcccgtgcaggagggcagcagccgtacccctcccagcaactacagagaaggcctgggcactgaaatggtgcctaccttctggaatgtctgtgccccaggtccttagaatgtctgcttcccgccgtggccaggaccactattctcactgagggaggaggatgtcccaactgcagccatgctgcttagagacaagaaagcagctgatgtcacccacaaacgatgttgttgaaaagttttgatgtgtaagtaaatacccactttctgtacctgctgtgccttgttgaggctatgtcatctgccacctttcccttgaggataaacaaggggtcctgaagacttaaatttagcggcctgacgttcctttgcacacaatcaatgctcgccagaatgttgttgacacagtaatgcccagcagaggcctttactagagcatcctttggacggcgaaggccacggcctttcaagatggaaagcagcagcttttccacttccccagagacattctggatgcatttgcattgagtctgaaagggggcttgagggacgtttgtgacttcttggcgactgccttttgtgtgtggaagagacttggaaaggtctcagactgaatgtgaccaattaaccagcttggttgatgatgggggaggggctgagttgtgcatgggcccaggtctggagggccacgtaaaatcgttctgagtcgtgagcagtgtccaccttgaaggtcttc

SEQ ID NO: 185 - protein, 807 aa, human organism
MPPFLLLEAVCVFLFSRVPPSLPLQEVHVSKETIGKISAASKMMWCSAAVDIMFLLDGSNSVGKGSFERSKHFAITVCDGLDISPERVRVGAFQFSSTPHLEFPLDSFSTQQEVKARIKRMVFKGGRTETELALKYLLHRGLPGGRNASVPQILIIVTDGKSQGDVALPSKQLKERGVTVFAVGVRFPRWEELHALASEPRGQHVLLAEQVEDATNGLFSTLSSSAICSSATPDCRVEAHPCEHRTLEMVREFAGNAPCWRGSRRTLAVLAAHCPFYSWKRVFLTHPATCYRTTCPGPCDSQPCQNGGTCVPEGLDGYQCLCPLAFGGEANCALKLSLECRVDLLFLLDSSAGTTLDGFLRAKVFVKRFVRAVLSEDSRARVGVATYSRELLVAVPVGEYQDVPDLVWSLDGIPFRGGPTLTGSALRQAAERGFGSATRTGQDRPRRVVVLLTESHSEDEVAGPARHARARELLLLGVGSEAVRAELEEITGSPKHVMVYSDPQDLFNQIPELQGKLCSRQRPGCRTQALDLVFMLDTSASVGPENFAQMQSFVRSCALQFEVNPDVTQVGLVVYGSQVQTAFGLDTKPTRAAMLRAISQAPYLGGVGSAGTALLHIYDKVMTVQRGARPGVPKAVVVLTGGRGAEDAAVPAQKLRNNGISVLVVGVGPVLSEGLRRLAGPRDSLIHVAAYADLRYHQDVLIEWLCGEAKQPVNLCKPSPCMNEGSCVLQNGSYRCKCRDGWEGPHCENREWSSCSVCVSQGWILETPLRHMAPVQEGSSRTPPSNYREGLGTEMVPTFWNVCAPGP

SEQ ID NO: 186 - DNA, 1723 bp, human organism
tgctacccgcgcccgggcttctggggtgttccccaaccacggcccagccctgccacaccccccgcccccggcctccgcagctcggcatgggcgcgggggtgctcgtcctgggcgcctccgagcccggtaacctgtcgtcggccgcaccgctccccgacggcgcggccaccgcggcgcggctgctggtgcccgcgtcgccgcccgcctcgttgctgcctcccgccagcgaaagccccgagccgctgtctcagcagtggacagcgggcatgggtctgctgatggcgctcatcgtgctgctcatcgtggcgggcaatgtgctggtgatcgtggccatcgccaagacgccgcggctgcagacgctcaccaacctcttcatcatgtccctggccagcgccgacctggtcatggggctgctggtggtgccgttcggggccaccatcgtggtgtggggccgctgggagtacggctccttcttctgcgagctgtggacctcagtggacgtgctgtgcgtgacggccagcatcgagaccctgtgtgtcattgccctggaccgctacctcgccatcacctcgcccttccgctaccagagcctgctgacgcgcgcgcgggcgcggggcctcgtgtgcaccgtgtgggccatctcggccctggtgtccttcctgcccatcctcatgcactggtggcgggcggagagcgacgaggcgcgccgctgctacaacgaccccaagtgctgcgacttcgtcaccaaccgggcctacgccatcgcctcgtccgtagtctccttctacgtgcccctgtgcatcatggccttcgtgtacctgcgggtgttccgcgaggcccagaagcaggtgaagaagatcgacagctgcgagcgccgtttcctcggcggcccagcgcggccgccctcgccctcgccctcgcccgtccccgcgcccgcgccgccgcccggacccccgcgccccgccgccgccgccgccaccgccccgctggccaacgggcgtgcgggtaagcggcggccctcgcgcctcgtggccctacgcgagcagaaggcgctcaagacgctgggcatcatcatgggcgtcttcacgctctgctggctgcccttcttcctggccaacgtggtgaaggccttccaccgcgagctggtgcccgaccgcctcttcgtcttcttcaactggctgggctacgccaactcggccttcaaccccatcatctactgccgcagccccgacttccgcaaggccttccagggactgctctgctgcgcgcgcagggctgcccgccggcgccacgcgacccacggagaccggccgcgcgcctcgggctgtctggcccggcccggacccccgccatcgcccggggccgcctcggacgacgacgacgacgatgtcgtcggggccacgccgcccgcgcgcctgctggagccctgggccggctgcaacggcggggcggcggcggacagcgactcgagcctggacgagccgtgccgccccggcttcgcctcggaatccaaggtgtagggcccggcgcggggcgcggactccgggcacggcttcccaggggaacgaggagatctgtgtttacttaagaccgatagcaggtgaactcgaagcccacaatcctcgtctgaatcatccgaggcaaagagaaaagccacggaccgttgcacaaaaaggaaagtttgggaagggatgggagagtggcttgctgatgttccttgttg

SEQ ID NO: 187 - protein, 477 aa, human organism
MGAGVLVLGASEPGNLSSAAPLPDGAATAARLLVPASPPASLLPPASESPEPLSQQWTAGMGLLMALIVLLIVAGNVLVIVAIAKTPRLQTLTNLFIMSLASADLVMGLLVVPFGATIVVWGRWEYGSFFCELWTSVDVLCVTASIETLCVIALDRYLAITSPFRYQSLLTRARARGLVCTVWAISALVSFLPILMHWWRAESDEARRCYNDPKCCDFVTNRAYAIASSVVSFYVPLCIMAFVYLRVFREAQKQVKKIDSCERRFLGGPARPPSPSPSPVPAPAPPPGPPRPAAAAATAPLANGRAGKRRPSRLVALREQKALKTLGIIMGVFTLCWLPFFLANVVKAFHRELVPDRLFVFFNWLGYANSAFNPIIYCRSPDFRKAFQGLLCCARRAARRRHATHGDRPRASGCLARPGPPPSPGAASDDDDDDVVGATPPARLLEPWAGCNGGAAADSDSSLDEPCRPGFASESKV

SEQ ID NO: 188 - DNA, 3737 bp, human organism
ggcgtccgcgcacacctccccgcgccgccgccgccaccgcccgcactccgccgcctctgcccgcaaccgctgagccatccatgggggtcgcgggccgcaaccgtcccggggcggcctgggcggtgctgctgctgctgctgctgctgccgccactgctgctgctggcgggggccgtcccgccgggtcggggccgtgccgcggggccgcaggaggatgtagatgagtgtgcccaagggctagatgactgccatgccgacgccctgtgtcagaacacacccacctcctacaagtgctcctgcaagcctggctaccaaggggaaggcaggcagtgtgaggacatcgatgaatgtggaaatgagctcaatggaggctgtgtccatgactgtttgaatattccaggcaattatcgttgcacttgttttgatggcttcatgttggctcatgacggtcataattgtcttgatgtggacgagtgcctggagaacaatggcggctgccagcatacctgtgtcaacgtcatggggagctatgagtgctgctgcaaggaggggtttttcctgagtgacaatcagcacacctgcattcaccgctcggaagagggcctgagctgcatgaataaggatcacggctgtagtcacatctgcaaggaggccccaaggggcagcgtcgcctgtgagtgcaggcctggttttgagctggccaagaaccagagagactgcatcttgacctgtaaccatgggaacggtgggtgccagcactcctgtgacgatacagccgatggcccagagtgcagctgccatccacagtacaagatgcacacagatgggaggagctgccttgagcgagaggacactgtcctggaggtgacagagagcaacaccacatcagtggtggatggggataaacgggtgaaacggcggctgctcatggaaacgtgtgctgtcaacaatggaggctgtgaccgcacctgtaaggatacttcgacaggtgtccactgcagttgtcctgttggattcactctccagttggatgggaagacatgtaaagatattgatgagtgccagacccgcaatggaggttgtgatcatttctgcaaaaacatcgtgggcagttttgactgcggctgcaagaaaggatttaaattattaacagatgagaagtcttgccaagatgtggatgagtgctctttggataggacctgtgaccacagctgcatcaaccaccctggcacatttgcttgtgcttgcaaccgagggtacaccctgtatggcttcacccactgtggagacaccaatgagtgcagcatcaacaacggaggctgtcagcaggtctgtgtgaacacagtgggcagctatgaatgccagtgccaccctgggtacaagctccactggaataaaaaagactgtgtggaagtgaaggggctcctgcccacaagtgtgtcaccccgtgtgtccctgcactgcggtaagagtggtggaggagacgggtgcttcctcagatgtcactctggcattcacctctcttcagatgtcaccaccatcaggacaagtgtaacctttaagctaaatgaaggcaagtgtagtttgaaaaatgctgagctgtttcccgagggtctgcgaccagcactaccagagaagcacagctcagtaaaagagagcttccgctacgtaaaccttacatgcagctctggcaagcaagtcccaggagcccctggccgaccaagcacccctaaggaaatgtttatcactgttgagtttgagcttgaaactaaccaaaaggaggtgacagcttcttgtgacctgagctgcatcgtaaagcgaaccgagaagcggctccgtaaagccatccgcacgctcagaaaggccgtccacagggagcagtttcacctccagctctcaggcatgaacctcgacgtggctaaaaagcctcccagaacatctgaacgccaggcagagtcctgtggagtgggccagggtcatgcagaaaaccaatgtgtcagttgcagggctgggacctattatgatggagcacgagaacgctgcattttatgtccaaatggaaccttccaaaatgaggaaggacaaatgacttgtgaaccatgcccaagaccaggaaattctggggccctgaagaccccagaagcttggaatatgtctgaatgtggaggtctgtgtcaacctggtgaatattctgcagatggctttgcaccttgccagctctgtgccctgggcacgttccagcctgaagctggtcgaacttcctgcttcccctgtggaggaggccttgccaccaaacatcagggagctacttcctttcaggactgtgaaaccagagttcaatgttcacctggacatttctacaacaccaccactcaccgatgtattcgttgcccagtgggaacataccagcctgaatttggaaaaaataattgtgtttcttgcccaggaaatactacgactgactttgatggctccacaaacataacccagtgtaaaaacagaagatgtggaggggagctgggagatttcactgggtacattgaatccccaaactacccaggcaattacccagccaacaccgagtgtacgtggaccatcaacccaccccccaagcgccgcatcctgatcgtggtccctgagatcttcctgcccatagaggacgactgtggggactatctggtgatgcggaaaacctcttcatccaattctgtgacaacatatgaaacctgccagacctacgaacgccccatcgccttcacctccaggtcaaagaagctgtggattcagttcaagtccaatgaagggaacagcgctagagggttccaggtcccatacgtgacatatgatgaggactaccaggaactcattgaagacatagttcgagatggcaggctctatgcatctgagaaccatcaggaaatacttaaggataagaaacttatcaaggctctgtttgatgtcctggcccatccccagaactatttcaagtacacagcccaggagtcccgagagatgtttccaagatcgttcatccgattgctacgttccaaagtgtccaggtttttgagaccttacaaatgactcagcccacgtgccactcaatacaaatgttctgctatagggttggtgggacagagctgtcttccttctgcatgtcagcacagtcgggtattgctgcctcccgtatcagtgactcattagagttcaatttttatagataatacagatattttggtaaattgaacttggtttttctttcccagcatcgtggatgtagactgagaatggctttgagtggcatcagcttctcactgctgtgggcggatgtcttggatagatcacgggctggctgagctggactttggtcagcctaggtgagactcacctgtccttctggggtcttactcctcctcaaggagtctgtagtggaaaggaggccacagaataagctgcttattctgaaacttcagcttcctctagcccggccctctctaagggagccctctgcactcgtgtgcaggctctgaccaggcagaacaggcaagaggggagggaaggagacccctgcaggctccctccacccaccttgagacctgggaggactcagtttctccacagccttctccagcctgtgtgatacaagtttgatcccaggaacttgagttctaagcagtgctcgtgaaaaaaaaaagcagaaagaattagaaataaataaaaactaagcacttctggagacat

SEQ ID NO: 189 - protein, 999 aa, human organism
MGVAGRNRPGAAWAVLLLLLLLPPLLLLAGAVPPGRGRAAGPQEDVDECAQGLDDCHADALCQNTPTSYKCSCKPGYQGEGRQCEDIDECGNELNGGCVHDCLNIPGNYRCTCFDGFMLAHDGHNCLDVDECLENNGGCQHTCVNVMGSYECCCKEGFFLSDNQHTCIHRSEEGLSCMNKDHGCSHICKEAPRGSVACECRPGFELAKNQRDCILTCNHGNGGCQHSCDDTADGPECSCHPQYKMHTDGRSCLEREDTVLEVTESNTTSVVDGDKRVKRRLLMETCAVNNGGCDRTCKDTSTGVHCSCPVGFTLQLDGKTCKDIDECQTRNGGCDHFCKNIVGSFDCGCKKGFKLLTDEKSCQDVDECSLDRTCDHSCINHPGTFACACNRGYTLYGFTHCGDTNECSINNGGCQQVCVNTVGSYECQCHPGYKLHWNKKDCVEVKGLLPTSVSPRVSLHCGKSGGGDGCFLRCHSGIHLSSDVTTIRTSVTFKLNEGKCSLKNAELFPEGLRPALPEKHSSVKESFRYVNLTCSSGKQVPGAPGRPSTPKEMFITVEFELETNQKEVTASCDLSCIVKRTEKRLRKAIRTLRKAVHREQFHLQLSGMNLDVAKKPPRTSERQAESCGVGQGHAENQCVSCRAGTYYDGARERCILCPNGTFQNEEGQMTCEPCPRPGNSGALKTPEAWNMSECGGLCQPGEYSADGFAPCQLCALGTFQPEAGRTSCFPCGGGLATKHQGATSFQDCETRVQCSPGHFYNTTTHRCIRCPVGTYQPEFGKNNCVSCPGNTTTDFDGSTNITQCKNRRCGGELGDFTGYIESPNYPGNYPANTECTWTINPPPKRRILIVVPEIFLPIEDDCGDYLVMRKTSSSNSVTTYETCQTYERPIAFTSRSKKLWIQFKSNEGNSARGFQVPYVTYDEDYQELIEDIVRDGRLYASENHQEILKDKKLIKALFDVLAHPQNYFKYTAQESREMFPRSFIRLLRSKVSRFLRPYK

SEQ ID NO: 190 - DNA, 2642 bp, human organism
aaggaggcggcctccgggaaaagcgaccgcaggactcctgagagcagcctccatgaggccctggaccagtgcatgaccgccctggacctcttcctcaccaaccagttctcagaagcactcagctacctcaagcccagaaccaaggaaagcatgtaccactcactgacatatgccaccatcctggagatgcaggccatgatgacctttgaccctcaggacatcctgcttgccggcaacatgatgaaggaggcacagatgctgtgtcagaggcaccggaggaagtcttctgtaacagattccttcagcagcctggtgaaccgccccacgctgggccaattcactgaagaagaaatccacgctgaggtctgctatgcagagtgcctgctgcagcgagcagccctgaccttcctgcaggacgagaacatggtgagcttcatcaaaggcggcatcaaagttcgaaacagctaccagacctacaaggagctggacagccttgttcagtcctcacaatactgcaagggtgagaaccacccgcactttgaaggaggagtgaagcttggtgtaggggccttcaacctgacactgtccatgcttcctactaggatcctgaggctgttggagtttgtggggttttcaggaaacaaggactatgggctgctgcagctggaggagggagcgtcagggcacagcttccgctctgtgctctgtgtcatgctcctgctgtgctaccacaccttcctcaccttcgtgctcggtactgggaacgtcaacatcgaggaggccgagaagctcttgaagccctacctgaaccggtaccctaagggtgccatcttcctgttctttgcagggaggattgaagtcattaaaggcaacattgatgcagccatccggcgtttcgaggagtgctgtgaggcccagcagcactggaagcagtttcaccacatgtgctactgggagctgatgtggtgcttcacctacaagggccagtggaagatgtcctacttctacgccgacctgctcagcaaggagaactgctggtccaaggccacctacatttacatgaaggccgcctacctcagcatgtttgggaaggaggaccacaagccgttcggggacgacgaagtggaattatttcgagctgtgccaggcctgaagctcaagattgctgggaaatctctacccacagagaagtttgccatccggaagtcccggcgctacttctcctccaaccctatctcgctgccagtgcctgctctggaaatgatgtacatctggaacggctacgccgtgattgggaagcagccgaaactcacggatgggatacttgagattatcactaaggctgaagagatgctggagaaaggcccagagaacgagtactcagtggatgacgagtgcttggtgaaattgttgaaaggcctgtgtctgaaatacctgggccgtgtccaggaggccgaggagaattttaggagcatctctgccaatgaaaagaagattaaatatgaccactacttgatcccaaacgccctgctggagctggccctgctgcttatggagcaagacagaaacgaagaggccatcaaacttttggaatctgccaagcaaaactacaagaattactccatggagtcaaggacacactttcgaatccaggcagccacactccaagccaagtcttccctagagaacagcagcagatccatggtctcatcagtgtccttgtagctttgtgcagcagttccgggctggaagacagagacagctggacagagctcctgaaaacatttcaaaataccccctccccctgccctgccctgcctttggggtccaccggcactccagttggatggcacaacatagtgtatccgtgcagaagccgagctggcattttcaccagtgtagccaagggcctttgccaagggcagagcaggtggagccctctgcctgccctatcacacatacgggtacttgcttttcactgtgatgtttaagagaatgtatgaacagtttacattttccttagaaatacattgatgggatcacagttggctttaaaaaccaacaacaatcaaccacctgtaagtctttgtcttcacctattatcatctggaggtaaatctctttatatgatgatgccaaagggcaaattgcttttcaaattcagcaagttctcagcttgtgtgacggaaggtccttcagaggacctgaggaatgcctgggagaggctaagcctcaggcttcaatgcttctggggttgggcatgaggatgtacacagacacccactaccttactactcacacttcatttcactccttttgtaaatttccaatttaaaaatcaagcacgtctttttagtgagataaaatctgagctcttctgtagaaaaatcaatctctaccagtagaaaatgccagggcttgatggaagagctgtgtagccctttctatgccaaagccaggaaatttggggggcaggaggaggttctcagaatccagtctgtatctttgctgtatgccaaactgaaaccactgggaataatttatgaaacataaaaatcttctgtacttcactccaaggtacatttgcttactgacagcatttttgttaaaactgttattcttgaaaaaaaaaaaaaaaaaaa

SEQ ID NO: 191 - protein, 550 aa, human organism
MTALDLFLTNQFSEALSYLKPRTKESMYHSLTYATILEMQAMMTFDPQDILLAGNMMKEAQMLCQRHRRKSSVTDSFSSLVNRPTLGQFTEEEIHAEVCYAECLLQRAALTFLQDENMVSFIKGGIKVRNSYQTYKELDSLVQSSQYCKGENHPHFEGGVKLGVGAFNLTLSMLPTRILRLLEFVGFSGNKDYGLLQLEEGASGHSFRSVLCVMLLLCYHTFLTFVLGTGNVNIEEAEKLLKPYLNRYPKGAIFLFFAGRIEVIKGNIDAAIRRFEECCEAQQHWKQFHHMCYWELMWCFTYKGQWKMSYFYADLLSKENCWSKATYIYMKAAYLSMFGKEDHKPFGDDEVELFRAVPGLKLKIAGKSLPTEKFAIRKSRRYFSSNPISLPVPALEMMYIWNGYAVIGKQPKLTDGILEIITKAEEMLEKGPENEYSVDDECLVKLLKGLCLKYLGRVQEAEENFRSISANEKKIKYDHYLIPNALLELALLLMEQDRNEEAIKLLESAKQNYKNYSMESRTHFRIQAATLQAKSSLENSSRSMVSSVSL

SEQ ID NO: 192 - DNA, 4427 bp, human organism
atgactaggaagaggacatactgggtgcccaactcttctggtggcctcgtgaatcgtggcatcgacataggcgatgacatggtttcaggacttatttataaaacctatactctccaagatggcccctggagtcagcaagagagaaatcctgaggctccagggagggcagctgtcccaccgtgggggaagtatgatgctgccttgagaaccatgattcccttccgtcccaagccgaggtttcctgccccccagcccctggacaatgctggcctgttctcctacctcaccgtgtcatggctcaccccgctcatgatccaaagcttacggagtcgcttagatgagaacaccatccctccactgtcagtccatgatgcctcagacaaaaatgtccaaaggcttcaccgcctttgggaagaagaagtctcaaggcgagggattgaaaaagcttcagtgcttctggtgatgctgaggttccagagaacaaggttgattttcgatgcacttctgggcatctgcttctgcattgccagtgtactcgggccaatattgattataccaaagatcctggaatattcagaagagcagttggggaatgttgtccatggagtgggactctgctttgccctttttctctccgaatgtgtgaagtctctgagtttctcctccagttggatcatcaaccaacgcacagccatcaggttccgagcagctgtttcctcctttgcctttgagaagctcatccaatttaagtctgtaatacacatcacctcaggagaggccatcagcttcttcaccggtgatgtaaactacctgtttgaaggggtgtgctatggacccctagtactgatcacctgcgcatcgctggtcatctgcagcatttcttcctacttcattattggatacactgcatttattgccatcttatgctatctcctggttttcccactggcggtattcatgacaagaatggctgtgaaggctcagcatcacacatctgaggtcagcgaccagcgcatccgtgtgaccagtgaagttctcacttgcattaagctgattaaaatgtacacatgggagaaaccatttgcaaaaatcattgaaggtatggaaagtctgactttctgctccaaacctggtgatggcatggccttcagcatgctggcctccttgaatctccttcggctgtcagtgttctttgtgcctattgcagtcaaaggtctcacgaattccaagtctgcagtgatgaggttcaagaagtttttcctccaggagagccctgttttctatgtccagacattacaagaccccagcaaagctctggtctttgaggaggccaccttgtcatggcaacagacctgtcccgggatcgtcaatggggcactggagctggagaggaacgggcatgcttctgaggggatgaccaggcctagagatgccctcgggccagaggaagaagggaacagcctgggcccagagttgcacaagatcaacctggtggtgtccaaggggatgatgttaggggtctgcggcaacacggggagtggtaagagcagcctgttgtcagccatcctggaggagatgcacttgctcgagggctcggtgggggtgcagggaagcctggcctatgtcccccagcaggcctggatcgtcagcgggaacatcagggagaacatcctcatgggaggcgcatatgacaaggcccgatacctccaggtgctccactgctgctccctgaatcgggacctggaacttctgccctttggagacatgacagagattggagagcggggcctcaacctctctggggggcagaaacagaggatcagcctggcccgcgccgtctattccgaccgtcagatctacctgctggacgaccccctgtctgctgtggacgcccacgtggggaagcacatttttgaggagtgcattaagaagacactcagggggaagacggtcgtcctggtgacccaccagctgcagtacttagaattttgtggccagatcattttgttggaaaatgggaaaatctgtgaaaatggaactcacagtgagttaatgcagaaaaaggggaaatatgcccaacttatccagaagatgcacaaggaagccacttcggacatgttgcaggacacagcaaagatagcagagaagccaaaggtagaaagtcaggctctggccacctccctggaagagtctctcaacggaaatgctgtgccggagcatcagctcacacaggaggaggagatggaagaaggctccttgagttggagggtctaccaccactacatccaggcagctggaggttacatggtctcttgcataattttcttcttcgtggtgctgatcgtcttcttaacgatcttcagcttctggtggctgagctactggttggagcagggctcggggaccaatagcagccgagagagcaatggaaccatggcagacctgggcaacattgcagacaatcctcaactgtccttctaccagctggtgtacgggctcaacgccctgctcctcatctgtgtgggggtctgctcctcagggattttcaccaaagtcacgaggaaggcatccacggccctgcacaacaagctcttcaacaaggttttccgctgccccatgagtttctttgacaccatcccaataggccggcttttgaactgcttcgcaggggacttggaacagctggaccagctcttgcccatcttttcagagcagttcctggtcctgtccttaatggtgatcgccgtcctgttgattgtcagtgtgctgtctccatatatcctgttaatgggagccataatcatggttatttgcttcatttattatatgatgttcaagaaggccatcggtgtgttcaagagactggagaactatagccggtctcctttattctcccacatcctcaattctctgcaaggcctgagctccatccatgtctatggaaaaactgaagacttcatcagccagtttaagaggctgactgatgcgcagaataactacctgctgttgtttctatcttccacacgatggatggcattgaggctggagatcatgaccaaccttgtgaccttggctgttgccctgttcgtggcttttggcatttcctccaccccctactcctttaaagtcatggctgtcaacatcgtgctgcagctggcgtccagcttccaggccactgcccggattggcttggagacagaggcacagttcacggctgtagagaggatactgcagtacatgaagatgtgtgtctcggaagctcctttacacatggaaggcacaagttgtccccaggggtggccacagcatggggaaatcatatttcaggattatcacatgaaatacagagacaacacacccaccgtgcttcacggcatcaacctgaccatccgcggccacgaagtggtgggcatcgtgggaaggacgggctctgggaagtcctccttgggcatggctctcttccgcctggtggagcccatggcaggccggattctcattgacggcgtggacatttgcagcatcggcctggaggacttgcggtccaagctctcagtgatccctcaagatccagtgctgctctcaggaaccatcagattcaacctagatccctttgaccgtcacactgaccagcagatctgggatgccttggagaggacattcctgaccaaggccatctcaaagttccccaaaaagctgcatacagatgtggtggaaaacggtggaaacttctctgtgggggagaggcagctgctctgcattgccagggctgtgcttcgcaactccaagatcatccttatcgatgaagccacagcctccattgacatggagacagacaccctgatccagcgcacaatccgtgaagccttccagggctgcaccgtgctcgtcattgcccaccgtgtcaccactgtgctgaactgtgaccacatcctggttatgggcaatgggaaggtggtagaatttgatcggccggaggtactgcggaagaagcctgggtcattgttcgcagccctcatggccacagccacttcttcactgagataaggagatgtggagacttcatggaggctggcagctgagctcagaggttcacacaggtgcagcttcgaggcccacagtctgcgaccttcttgtttggagatgagaacttctcctggaagcaggggtaaatgtagggggggtggggattgctggatggaaaccctggaataggctacttgatggctctcaagaccttagaaccccagaaccatctaagacatgggattcagtgatcatgtggttctccttttaacttacatgctgaataattttataataaggtaaaagcttatagttttctgatctgtgttagaagtgytgcaaatgctgtactgactttgtaaaatataaaactaaggaaaactcaaaaaaaaaaaaaaaaaaaa

SEQ ID NO: 193 - protein, 1347 aa, human organism
MTRKRTYWVPNSSGGLVNRGIDIGDDMVSGLIYKTYTLQDGPWSQQERNPEAPGRAAVPPWGKYDAALRTMIPFRPKPRFPAPQPLDNAGLFSYLTVSWLTPLMIQSLRSRLDENTIPPLSVHDASDKNVQRLHRLWEEEVSRRGIEKASVLLVMLRFQRTRLIFDALLGICFCIASVLGPILIIPKILEYSEEQLGNVVHGVGLCFALFLSECVKSLSFSSSWIINQRTAIRFRAAVSSFAFEKLIQFKSVIHITSGEAISFFTGDVNYLFEGVCYGPLVLITCASLVICSISSYFIIGYTAFIAILCYLLVFPLAVFMTRMAVKAQHHTSEVSDQRIRVTSEVLTCIKLIKMYTWEKPFAKIIEGMESLTFCSKPGDGMAFSMLASLNLLRLSVFFVPIAVKGLTNSKSAVMRFKKFFLQESPVFYVQTLQDPSKALVFEEATLSWQQTCPGIVNGALELERNGHASEGMTRPRDALGPEEEGNSLGPELHKINLVVSKGMMLGVCGNTGSGKSSLLSAILEEMHLLEGSVGVQGSLAYVPQQAWIVSGNIRENILMGGAYDKARYLQVLHCCSLNRDLELLPFGDMTEIGERGLNLSGGQKQRISLARAVYSDRQIYLLDDPLSAVDAHVGKHIFEECIKKTLRGKTVVLVTHQLQYLEFCGQIILLENGKICENGTHSELMQKKGKYAQLIQKMHKEATSDMLQDTAKIAEKPKVESQALATSLEESLNGNAVPEHQLTQEEEMEEGSLSWRVYHHYIQAAGGYMVSCIIFFFVVLIVFLTIFSFWWLSYWLEQGSGTNSSRESNGTMADLGNIADNPQLSFYQLVYGLNALLLICVGVCSSGIFTKVTRKASTALHNKLFNKVFRCPMSFFDTIPIGRLLNCFAGDLEQLDQLLPIFSEQFLVLSLMVIAVLLIVSVLSPYILLMGAIIMVICFIYYMMFKKAIGVFKRLENYSRSPLFSHILNSLQGLSSIHVYGKTEDFISQFKRLTDAQNNYLLLFLSSTRWMALRLEIMTNLVTLAVALFVAFGISSTPYSFKVMAVNIVLQLASSFQATARIGLETEAQFTAVERILQYMKMCVSEAPLHMEGTSCPQGWPQHGEIIFQDYHMKYRDNTPTVLHGINLTIRGHEVVGIVGRTGSGKSSLGMALFRLVEPMAGRILIDGVDICSIGLEDLRSKLSVIPQDPVLLSGTIRFNLDPFDRHTDQQIWDALERTFLTKAISKFPKKLHTDVVENGGNFSVGERQLLCIARAVLRNSKIILIDEATASIDMETDTLIQRTIREAFQGCTVLVIAHRVTTVLNCDHILVMGNGKVVEFDRPEVLRKKPGSLFAALMATATSSLR

SEQ ID NO: 194 - DNA, 3690 bp, human organism
atgctgtctggcttcttgatgagtcccagtacccagcacagagcacagtacactcccggaggaaagaaacttccgtgggaggcttccatcggtgcgcacacctcccgagggcgaggcagcgaccgggagagggagagccggccggaggctgccgggctcctgtgggaccgcgctgcagccggggaggcggagaaggggaaccggggcgagccgcccgcctggatccgcgcccagcagcagccgcggccgccgccagctgggcaggctcccgggactgcggctgggggcgcgcaggaccctcgcctgcgtcctggacgttcccgggggagggtccggttgccagtgaaacctccagaggcttccggacgacagccccgggggccttctgactgcatcccgagatttccatcagcgagtgcaactcataaggcagtccctaaggggaccgggccaccggctgaggacggggatggcttaggagctcctggacctagggcccggcgtcgtcgcctcctgggcgtcgcggcagaggggagtggcccgcgcggaaagcgccgcgggacagtcagtgacgaggcccgggggtcgccggggccacgacttctcggagaccgtcctgcgctctctggagacgcgctgtccgcgcccagggtggtgccatgtggggcgctcgccgctcgtccgtctcctcatcctggaacgccgcttcgctcctgcagctgctgctggctgcgctgctggcggcgggggcgagggcccagcggcgagtactgccacggctggctggacgcgcagggcgtctggcgcatcggcttccagtgtcccgagcgcttcgacggcggcgacgccaccatctgctgcggcagctgcgcgttgcgctactgctgctccagcgccgaggcgcgcctggaccagggcggctgcgacaatgaccgccagcagggcgctggcgagcctggccgggcggacaaagacgggccccgacggctcggcagggcttcatgtcttaggggtacccaaggagacggcgagggtgcgcccccacccgtgagggcctggcagcggtgctcccctgaaggctccccgaaaggaaggcagctcctcagggctttcccggggctgctgccccgtgccagacgccgcggattcccatcttctccacgcggcggcccctctcccctgcagcggcccgccttgcccatctacgtgccgttcctcattgttggctccgtgtttgtcgcctttatcatcttggggtccctggtggcagcctgttgctgcagatgtctccggcctaagcaggatccccagcagagccgagccccagggggtaaccgcttgatggagaccatccccatgatccccagtgccagcacctcccgggggtcgtcctcacgccagtccagcacagctgccagttccagctccagcgccaactccggggcccgggcgcccccaacaaggtcacagaccaactgttgcttgccggaagggaccatgaacaacgtgtatgtcaacatgcccacgaatttctctgtgctgaactgtcagcaggccacccagattgtgccacatcaagggcagtatctgcatcccccatacgtggggtacacggtgcagcacgactctgtgcccatgacagctgtgccacctttcatggacggcctgcagcctggctacaggcagattcagtcccccttccctcacaccaacagtgaacagaagatgtacccagcggtgactgtataaccgagagtcactggtgggttcctttactgaagggagacgaaggcaggggtggattctcgaggtggaagtccgcacatgtcggtggtatttatggcacgattcctttggatggcttcatttgcccccagactgtatgaaaacatctccgaattagcatttctggatatgtttcatccagggtatcattgatttatgatggaaaaccggcctcagctggagatgactgtgatgttgctgatgggtgtataacaaatgcttgagtccgaagtgcccttgagatatggttgacgaaagaattttataaactgataaattaaggatttttattatgttgttattattatttcttttttgttgttgactgcacaggatcaaaatgcctgttatctcccttttactgggactttttttttttttttttttttttttaatcagacagggtcttgctctgttgcccaggctggagtgcagtggtgcgatctcggctcactgcaacttcagcctcctggattcaggcaacactcctgcctcagcctcccacgtggctgggattacaggtgcctgcccccatggctaattttttgtattttttgtagagatggggtttcaccatgttggctgggctggtctcactctcctgacctcaagcaatctgcctgtctcagcctcccaaagtgctgggattacaggcgtgagccaccgcccccagcctgagcctttttttttttctaatgcatccaaggttaaggggaagacgcaaataacaggactattctaaaaggaaacctgtttgaactctgtgagatcagtcatcagtctcagtattccacaggcacaccttaatttcattgtaaaaagatatatatattttgtctatttttgtgcttttgggggcctattttgtgcttttttaccttatgtagagatcttattacaaagtgattttctacattaaaaagagactgaaataaattgtatagttacttaactaatgaagacatttcagaactctgggatgattttaatcttgaagtagtaggtggtatagtcataaaaccattcatccccttcttgattgtatcttaattttctggctttaaggtgacatctgagaggtaatgcattcttttttatattgaaatcataaactatcacccgctgcttctctgagttacttttaattttgccttgtggttatggtttggcgtttccttctgtttggttttcagagccccatgtctatatagtcctgagtgcaagtaattactatacttgtaaatgaagatcagtatttctgcctagatctgataaaaaaattttcttgtcttagttataaaaattcaaagaaatgtgttacaaagatacttagtatagctcctcagccataacctgagacttgggatgaaatttaaaccagatacgatttactttgcagatcataaggctttttatactcttgttatcaaaatggcttatttttcaggcactaaggattgttaagagaaaagcttttcaacgaaggattgcctttcttctcccacactgttcttgatttcctctctctttcaggcctcaacaggcactgtattcattgccaatgttccaaattatcaaattcaagtgaatttatttgtgtgttctttacttatataaaaaaagataactttaaggatgtgcaagtacatttccaactgctagcacaaccagtattttgtaattaaacaaatcgctgtatggtatggtcttctacacatttatgtctatagatatctatcgatcatctttctattctgtttcatgactgaataatgtaaaaccagtgttggcaattggtatcatcaatgatactcattttttaataaccaaaggcaggggaaaatcattttacttattaataaatattttatgatgtgaaaaaaaaaaaaaaaaaaaaaaaaaaaa

SEQ ID NO: 195 - protein, 582 aa, human organism [sequence omitted]

SEQ ID NO: 196 - DNA, 3096 bp, human organism
gcccttggacactgacatggactgaaggagtagaatggagcacgaggacactgacatggactgaagaaaaaggagctggagcaggagaaggaggtgctgctgcagggtttggagatgatggcgcggggccgcgactggtaccagcagcagctgcaacgagtgcaggagcgccagcgccgcctgggccagagcagagccagcgccgactttggggctgcagggagcccccgcccactggggcggctactgcccaaggtacaagaggtggcccggtgcctgggggagctgctggctgcagcctgtgccagccgggccctgcccccgtcctcctccgggcccccctgccctgccctgacgtccacctcacccccggtctggcagcagcagaccatcctcatgctgaaggagcagaaccgactcctcacccaggaggtgaccgagaagagtgagcgcatcacgcagctggagcaggagaagtcggcgctcattaagcagctgtttgaggcccgcgccctgagccagcaggacgggggacctctggattccaccttcatctagtccttgtgggccgcgtgggcccccagggccagcctggcactcagcccttcgagggtgggcgccccatcgcacccaccctctctggctggagacccccggcaggcccaggcacagtcccggagtgggcgccttcctgccgcccttgccagatgggctccccaggcctgcccccggctggtccccgcaccgagcgcttgactccgtttkggctcctggttgytgacatgggctgggggctctcttgagtccgcatagtccgcagctactactggccgctgtcagtggacagtggggtacccctccatgagttagcgtccccccgtttccagcggtgccgccctgggtcccatcttcagggaaaggcactgcccacgccaggctgcacttccaacaacgggcagcagagggcgcggggcggctccgacgcgggtccaagggcagcttcccgctcaaccagggcaccaggacgaggtggctgtagctcggacggacggaagtagatggagggggtggggacggcctgtaagcggggggtgcctgcctggctggggagccccagggatagcggtcggacttcaggttctggccaaggctgagggaccctggctgcagcggatcggcacgccgggtgggcgagagcttggcctgcatgtgcctcccacagaccctggggtgatggccttccccctcttggccgggacgttgccccacgttgagtcccacacaacatcctgtgagcctggctccccaggagggcccccagacagctcccaggcacgtcataggcaaagcctgtttcccccgactcaggatttccaaggcctggggtcctgctcacccccctttgctctcacgcccagcctgtccccaggtttcagctgggagaggccacctccctcagccaaggaaaacgagaacccccagggtacaggaggaggctggggcaggtccccttgggtgtcactccctcagcccctgcccaggcccactcccgctggtgctggagtacgcactggtgggggggccctgctcagcccaacctggagggtcccagtgtcaccagaaccaggggcacggcaacagcatcgatgggttctgcagcccagggcccccgatgcggggtcagtgtgtgtggggcgcagggcctccgatgcggggtcagtgcgtggggggcgcagggcccccgatgcggggtcagtgcgtggggggcgcagggccccctcgtgtccagggcactttggtacactgtcccacaaggcacctgtctcagaggaggggccctggcaggcagcgtggcaactcccttccggagcccagctccatgctaacctgcccacagcaaccccacagagccacattccctgctgcacctggtctgcaggggtgtcccaggacaggcccaagtcagcccagcatgcagctgccctcctaccctgaagatgggagtgggctttccaggggacataaggatgtcaggcctggacctcctgggcaggaaagggtgcaggtcctgagggcctgtgccccacagccccagcacccaggtggactgcagcgcagtgggtgggccagtggcagccagggagaagccccccgtcagcaggctggggtctgcccaccagggcctccccacgtctgcctttgagggtgcctgccatgccctgggggatcctggcatctttactggactggaagcaggagacagaacagtgtctgtcccggggtgacttcatcaggagaccgcccacatagagctggaccccgcagctgaagcggaaatgtgagacaggctggcacctccggaaaaactgcctttcagccttggtgttccgtgcaaggtgaaaagaaataggtcctcccagtttacagcttgaaatcaggctagtgagtggccctggagaccacgaggggagaatttaaaggccccggctggcagggtctaggtggctggcagaggcacatgcagaccctgcctggagcctgccctaggacgctgggcgggtcagtctccgtgcaggatgtgagcagcgtccctgggctctatccgcgaggtgccagtagcgtgtgcaggtacatacacgtgcgtgcacactgtgatgacacccggaaatgtctcaggatgttgaaatgtgtccttgggggcagaagtgtccccagttgagaatctgccccagaggaacacacccacaccaggcctcaggattttgtgttgatcaagttccaaggaaaaggaacatctcagccgggcgtggtggttcacgcctggaatcccagcacttgaggccaggagttccagagcagcctgggcaacgcagtgagagaccccatctctacaaraaaaaaaaaagaaagaaagaaaatgagagatccaggtttaaaaattcataaacaccacaaggaaacaatacactatgagacccagcagaagcaacagattgactctagacccagatactagaattatcagagagaatataaagtaacagtgttttatatatctaaagaaataaaagagatttctggaaacatgaaaaaaaa

SEQ ID NO: 197 - DNA, 3171 bp, human organism
gcggaacaccggcccgccgtcgcggcagctgcttcacccctctctctgcagccatggggctccctcgtggacctctcgcgtctctcctccttctccaggtttgctggctgcagtgcgcggcctccgagccgtgccgggcggtcttcagggaggctgaagtgaccttggaggcgggaggcgcggagcaggagcccggccaggcgctggggaaagtattcatgggctgccctgggcaagagccagctctgtttagcactgataatgatgacttcactgtgcggaatggcgagacagtccaggaaagaaggtcactgaaggaaaggaatccattgaagatcttcccatccaaacgtatcttacgaagacacaagagagattgggtggttgctccaatatctgtccctgaaaatggcaagggtcccttcccccagagactgaatcagctcaagtctaataaagatagagacaccaagattttctacagcatcacggggccgggggcagacagcccccctgagggtgtcttcgctgtagagaaggagacaggctggttgttgttgaataagccactggaccgggaggagattgccaagtatgagctctttggccacgctgtgtcagagaatggtgcctcagtggaggaccccatgaacatctccatcatcgtgaccgaccagaatgaccacaagcccaagtttacccaggacaccttccgagggagtgtcttagagggagtcctaccaggtacttctgtgatgcaggtgacagccacagatgaggatgatgccatctacacctacaatggggtggttgcttactccatccatagccaagaaccaaaggacccacacgacctcatgttcacaattcaccggagcacaggcaccatcagcgtcatctccagtggcctggaccgggaaaaagtccctgagtacacactgaccatccaggccacagacatggatggggacggctccaccaccacggcagtggcagtagtggagatccttgatgccaatgacaatgctcccatgtttgacccccagaagtacgaggcccatgtgcctgagaatgcagtgggccatgaggtgcagaggctgacggtcactgatctggacgcccccaactcaccagcgtggcgtgccacctaccttatcatgggcggtgacgacggggaccattttaccatcaccacccaccctgagagcaaccagggcatcctgacaaccaggaagggtttggattttgaggccaaaaaccagcacaccctgtacgttgaagtgaccaacgaggccccttttgtgctgaagctcccaacctccacagccaccatagtggtccacgtggaggatgtgaatgaggcacctgtgtttgtcccaccctccaaagtcgttgaggtccaggagggcatccccactggggagcctgtgtgtgtctacactgcagaagaccctgacaaggagaatcaaaagatcagctaccgcatcctgagagacccagcagggtggctagccatggacccagacagtgggcaggtcacagctgtgggcaccctcgaccgtgaggatgagcagtttgtgaggaacaacatctatgaagtcatggtcttggccatggacaatggaagccctcccaccactggcacgggaacccttctgctaacactgattgatgtcaacgaccatggcccagtccctgagccccgtcagatcaccatctgcaaccaaagccctgtgcgccacgtgctgaacatcacggacaaggacctgtctccccacacctcccctttccaggcccagctcacagatgactcagacatctactggacggcagaggtcaacgaggaaggtgacacagtggtcttgtccctgaagaagttcctgaagcaggatacatatgacgtgcacctttctctgtctgaccatggcaacaaagagcagctgacggtgatcagggccactgtgtgcgactgccatggccatgtcgaaacctgccctggaccctggaaaggaggtttcatcctccctgtgctgggggctgtcctggctctgctgttcctcctgctggtgctgcttttgttggtgagaaagaagcggaagatcaaggagcccctcctactcccagaagatgacacccgtgacaacgtcttctactatggcgaagaggggggtggcgaagaggaccaggactatgacatcacccagctccaccgaggtctggaggccaggccggaggtggttctccgcaatgacgtggcaccaaccatcatcccgacacccatgtaccgtcctaggccagccaacccagatgaaatcggcaactttataattgagaacctgaaggcggctaacacagaccccacagccccgccctacgacaccctcttggtgttcgactatgagggcagcggctccgacgccgcgtccctgagctccctcacctcctccgcctccgaccaagaccaagattacgattatctgaacgagtggggcagccgcttcaagaagctggcagacatgtacggtggcggggaggacgactaggcggcctgcctgcagggctggggaccaaacgtcaggccacagagcatctccaaggggtctcagttcccccttcagctgaggacttcggagcttgtcaggaagtggccgtagcaacttggcggagacaggctatgagtctgacgttagagtggttgcttccttagcctttcaggatggaggaatgtgggcagtttgacttcagcactgaaaacctctccacctgggccagggttgcctcagaggccaagtttccagaagcctcttacctgccgtaaaatgctcaaccctgtgtcctgggcctgggcctgctgtgactgacctacagtggactttctctctggaatggaaccttcttaggcctcctggtgcaacttaatttttttttttaatgctatcttcaaaacgttagagaaagttcttcaaaagtgcagcccagagctgctgggcccactggccgtcctgcatttctggtttccagaccccaatgcctcccattcggatggatctctgcgtttttatactgagtgtgcctaggttgccccttattttttattttccctgttgcgttgctatagatgaagggtgaggacaatcgtgtatatgtactagaacttttttattaaagaaa

SEQ ID NO: 198 - protein, 829 aa, human organism [sequence omitted]

SEQ ID NO: 199 - DNA, 1148 bp, human organism
cttctttaaatttctttctaggatgttcacttcttctccacaatgaatgagtgtcactatgacaagcacatggactttttttataataggagcaacactgatactgtcgatgactggacaggaacaaagcttgtgattgttttgtgtgttgggacgtttttctgcctgtttatttttttttctaattctctggtcatcgcggcagtgatcaaaaacagaaaatttcatttccccttctactacctgttggctaatttagctgctgccgatttcttcgctggaattgcctatgtattcctgatgtttaacacaggcccagtttcaaaaactttgactgtcaaccgctggtttctccgtcaggggcttctggacagtagcttgactgcttccctcaccaacttgctggttatcgccgtggagaggcacatgtcaatcatgaggatgcgggtccatagcaacctgaccaaaaagagggtgacactgctcattttgcttgtctgggccatcgccatttttatgggggcggtccccacactgggctggaattgcctctgcaacatctctgcctgctcttccctggcccccatttacagcaggagttaccttgttttctggacagtgtccaacctcatggccttcctcatcatggttgtggtgtacctgcggatctacgtgtacgtcaagaggaaaaccaacgtcttgtctccgcatacaagtgggtccatcagccgccggaggacacccatgaagctaatgaagacggtgatgactgtcttaggggcgtttgtggtatgctggaccccgggcctggtggttctgctcctcgacggcctgaactgcaggcagtgtggcgtgcagcatgtgaaaaggtggttcctgctgctggcgctgctcaactccgtcgtgaaccccatcatctactcctacaaggacgaggacatgtatggcaccatgaagaagatgatctgctgcttctctcaggagaacccagagaggcgtccctctcgcatcccctccacagtcctcagcaggagtgacacaggcagccagtacatagaggatagtattagccaaggtgcagtctgcaataaaagcacttcctaaactctggatgcctctcggcccacccaggtgatgactgtcttagg

SEQ ID NO: 200 - protein, 353 aa, human organism
MNECHYDKHMDFFYNRSNTDTVDDWTGTKLVIVLCVGTFFCLFIFFSNSLVIAAVIKNRKFHFPFYYLLANLAAADFFAGIAYVFLMFNTGPVSKTLTVNRWFLRQGLLDSSLTASLTNLLVIAVERHMSIMRMRVHSNLTKKRVTLLILLVWAIAIFMGAVPTLGWNCLCNISACSSLAPIYSRSYLVFWTVSNLMAFLIMVVVYLRIYVYVKRKTNVLSPHTSGSISRRRTPMKLMKTVMTVLGAFVVCWTPGLVVLLLDGLNCRQCGVQHVKRWFLLLALLNSVVNPIIYSYKDEDMYGTMKKMICCFSQENPERRPSRIPSTVLSRSDTGSQYIEDSISQGAVCNKSTS

SEQ ID NO: 201 - DNA, 892 bp, human organism
atgacctacagttactcatttttcaggcctgagttgatcgttaatcatcttaattatgttcattctgaagccaacaggagaaccaagaccaaaactttattgtctctgctttcatttcttgatgaaacctctggactaagcacacatcttccttgtttatctctctcaaaggagtgtggagtgcttcatctggacatccacgggaagaaggaagacatgagaatcacccaacagtcttcccagctatacctgtgggacatgggtggttttacaatatttaagaacctgtggatgagcctcatacccagagggaacaaacgctccccaaaaagagttacagaaaccatcctgagagattttaagcagaagcaaagttcaaagatccaagaggagagacgaagagagtctgcaggaccaaacctctcttcattctggtttgtggggaatgctggaagaggagacaggccccagatttgggcaggaagtaaacagttttcaggctgaggccaatctgagcaggaacattccaatatttcttcagctacgttgtcccagcacttcactggttaaccttttatgtccaccatttgtggatttcacagctacttgtcaatggtgaatattgatcatcatcattatctactgagctgctaccatatcccagctactccttgcatgttgttcattattttctcaacactcagcatatttgcaatatgttatgtaatatcacagacaaggaaactgaacgcagaaatgttttatttcttgccaaacatcacatgaggatgaacaatgaaaccgatttgaaaccaggattgtctgattccaacatctctgggtcctttttcactctgatatgctgcaattaaaaagccatttctaagactgt

SEQ ID NO: 202 - protein, 167 aa, human organism [sequence omitted]

SEQ ID NO: 203 - DNA, 2582 bp, human organism
  misc_feature (2553)..(2553): n is a, c, g, or t
  misc_feature (2556)..(2556): n is a, c, g, or t
tcacacgtgccaaggggctggctcagcggaaccagcctgcacgcgctggctccgggtgacagccgcgcgcctcggccaggatctgagtgatgagacgtgtccccactgaggtgccccacagcagcaggtgttgagcatgggctgagaagctggaccggcaccaaagggctggcagaaatgggcgcctggctgattcctaggcagttggcggcagcaaggaggagaggccgcagcttctggagcagagccgagacgaagcagttctggagtgcctgaacggccccctgagccctacccgcctggcccactatggtccagaggctgtgggtgagccgcctgctgcggcaccggaaagcccagctcttgctggtcaacctgctaacctttggcctggaggtgtgtttggccgcaggcatcacctatgtgccgcctctgctgctggaagtgggggtagaggagaagttcatgaccatggtgctgggcattggtccagtgctgggcctggtctgtgtcccgctcctaggctcagccagtgaccactggcgtggacgctatggccgccgccggcccttcatctgggcactgtccttgggcatcctgctgagcctctttctcatcccaagggccggctggctagcagggctgctgtgcccggatcccaggcccctggagctggcactgctcatcctgggcgtggggctgctggacttctgtggccaggtgtgcttcactccactggaggccctgctctctgacctcttccgggacccggaccactgtcgccaggcctactctgtctatgccttcatgatcagtcttgggggctgcctgggctacctcctgcctgccattgactgggacaccagtgccctggccccctacctgggcacccaggaggagtgcctctttggcctgctcaccctcatcttcctcacctgcgtagcagccacactgctggtggctgaggaggcagcgctgggccccaccgagccagcagaagggctgtcggccccctccttgtcgccccactgctgtccatgccgggcccgcttggctttccggaacctgggcgccctgcttccccggctgcaccagctgtgctgccgcatgccccgcaccctgcgccggctcttcgtggctgagctgtgcagctggatggcactcatgaccttcacgctgttttacacggatttcgtgggcgaggggctgtaccagggcgtgcccagagctgagccgggcaccgaggcccggagacactatgatgaaggcgttcggatgggcagcctggggctgttcctgcagtgcgccatctccctggtcttctctctggtcatggaccggctggtgcagcgattcggcactcgagcagtctatttggccagtgtggcagctttccctgtggctgccggtgccacatgcctgtcccacagtgtggccgtggtgacagcttcagccgccctcaccgggttcaccttctcagccctgcagatcctgccctacacactggcctccctctaccaccgggagaagcaggtgttcctgcccaaataccgaggggacactggaggtgctagcagtgaggacagcctgatgaccagcttcctgccaggccctaagcctggagctcccttccctaatggacacgtgggtgctggaggcagtggcctgctcccacctccacccgcgctctgcggggcctctgcctgtgatgtctccgtacgtgtggtggtgggtgagcccaccgaggccagggtggttccgggccggggcatctgcctggacctcgccatcctggatagtgccttcctgctgtcccaggtggccccatccctgtttatgggctccattgtccagctcagccagtctgtcactgcctatatggtgtctgccgcaggcctgggtctggtcgccatttactttgctacacaggtagtatttgacaagagcgacttggccaaatactcagcgtagaaaacttccagcacattggggtggagggcctgcctcactgggtcccagctccccgctcctgttagccccatggggctgccgggctggccgccagtttctgttgctgccaaagtaatgtggctctctgctgccaccctgtgctgctgaggtgcgtagctgcacagctgggggctggggcgtccctctcctctctccccagtctctagggctgcctgactggaggccttccaagggggtttcagtctggacttatacagggaggccagaagggctccatgcactggaatgcggggactctgcaggtggattacccaggctcagggttaacagctagcctcctagttgagacacacctagagaagggtttttgggagctgaataaactcagtcacctggtttcccatctctaagccccttaacctgcagcttcgtttaatgtagctcttgcatgggagtttctaggatgaaacactcctccatgggatttgaacatatgaaagttatttgtaggggaagagtcctgaggggcaacacacaagaaccaggtcccctcagccccacaggcactggtcttttttgctngantccaccccccccctctttaccctttt

SEQ ID NO: 204 - protein, 553 aa, human organism
MVQRLWVSRLLRHRKAQLLLVNLLTFGLEVCLAAGITYVPPLLLEVGVEEKFMTMVLGIGPVLGLVCVPLLGSASDHWRGRYGRRRPFIWALSLGILLSLFLIPRAGWLAGLLCPDPRPLELALLILGVGLLDFCGQVCFTPLEALLSDLFRDPDHCRQAYSVYAFMISLGGCLGYLLPAIDWDTSALAPYLGTQEECLFGLLTLIFLTCVAATLLVAEEAALGPTEPAEGLSAPSLSPHCCPCRARLAFRNLGALLPRLHQLCCRMPRTLRRLFVAELCSWMALMTFTLFYTDFVGEGLYQGVPRAEPGTEARRHYDEGVRMGSLGLFLQCAISLVFSLVMDRLVQRFGTRAVYLASVAAFPVAAGATCLSHSVAVVTASAALTGFTFSALQILPYTLASLYHREKQVFLPKYRGDTGGASSEDSLMTSFLPGPKPGAPFPNGHVGAGGSGLLPPPPALCGASACDVSVRVVVGEPTEARVVPGRGICLDLAILDSAFLLSQVAPSLFMGSIVQLSQSVTAYMVSAAGLGLVAIYFATQVVFDKSDLAKYSA

SEQ ID NO: 205 - DNA, 1593 bp, human organism
atggttcgccgggggctgcttgcgtggatttcccgggtggtggttttgctggtgctcctctgctgtgctatctctgtcctgtacatgttggcctgcaccccaaaaggtgacgaggagcagctggcactgcccagggccaacagccccacggggaaggaggggtaccaggccgtccttcaggagtgggaggagcagcaccgcaactacgtgagcagcctgaagcggcagatcgcacagctcaaggaggagctgcaggagaggagtgagcagctcaggaatgggcagtaccaagccagcgatgctgctggcctgggtctggacaggagccccccagagaaaacccaggccgacctcctggccttcctgcactcgcaggtggacaaggcagaggtgaatgctggcgtcaagctggccacagagtatgcagcagtgcctttcgatagctttactctacagaaggtgtaccagctggagactggccttacccgccaccccgaggagaagcctgtgaggaaggacaagcgggatgagttggtggaagccattgaatcagccttggagaccctgaacaatcctgcagagaacagccccaatcaccgtccttacacggcctctgatttcatagaagggatctaccgaacagaaagggacaaagggacattgtatgagctcaccttcaaaggggaccacaaacacgaattcaaacggctcatcttatttcgaccattcggccccatcatgaaagtgaaaaatgaaaagctcaacatggccaacacgcttatcaatgttatcgtgcctctagcaaaaagggtggacaagttccggcagttcatgcagaatttcagggagatgtgcattgagcaggatgggagagtccatctcactgttgtttactttgggaaagaagaaataaatgaagtcaaaggaatacttgaaaacacttccaaagctgccaacttcaggaactttaccttcatccagctgaatggagaattttctcggggaaagggacttgatgttggagcccgcttctggaagggaagcaacgtccttctctttttctgtgatgtggacatctacttcacatctgaattcctcaatacgtgtaggctgaatacacagccagggaagaaggtattttatccagttcttttcagtcagtacaatcctggcataatatacggccaccatgatgcagtccctcccttggaacagcagctggtcataaagaaggaaactggattttggagagactttggatttgggatgacgtgtcagtatcggtcagacttcatcaatataggtgggtttgatctggacatcaaaggctggggcggagaggatgtgcacctttatcgcaagtatctccacagcaacctcatagtggtacggacgcctgtgcgaggactcttccacctctggcatgagaagcgctgcatggacgagctgacccccgagcagtacaagatgtgcatgcagtccaaggccatgaacgaggcatcccacggccagctgggcatgctggtgttcaggcacgagatagaggctcaccttcgcaaacagaaacagaagacaagtagcaaaaaaacatga

SEQ ID NO: 206 - protein, 530 aa, human organism [sequence omitted]

SEQ ID NO: 207 - DNA, 2712 bp, human organism
atgattcctgtattgacatcaaaaaaagcaagtgaattaccagtcagtgaagttgcaagcattctccaagctgatcttcagaatggtctaaacaaatgtgaagttagtcataggcgagcctttcatggctggaatgagtttgatattagtgaagatgagccactgtggaagaagtatatttctcagtttaaaaatccccttattatgctgcttctggcttctgcagtcatcagtgttttaatgcatcagtttgatgatgccgtcagtatcactgtggcaatacttatcgttgttacagttgcctttgttcaggaatatcgttcagaaaaatctcttgaagaattgagtaaacttgtgccaccagaatgccattgtgtgcgtgaaggaaaattggagcatacacttgcccgagacttggttccaggtgatacagtttgcctttctgttggggatagagttcctgctgacttacgcttgtttgaggctgtggatctttccattgatgagtccagcttgacaggtgagacaacgccttgttctaaggtgacagctcctcagccagctgcaactaatggagatcttgcatcgagaagtaacattgcctttatgggaacactggtcagatgtggcaaagcaaagggtgttgtcattggaacaggagaaaattctgaatttggggaggtttttaaaatgatgcaagcagaagaggcaccaaaaacccctctgcagaagagcatggacctcttaggaaaacaactttccttttactcctttggtataataggaatcatcatgttggttggctggttactgggaaaagatatcctggaaatgtttactattagtgtaagtttggctgtagcagcaattcctgaaggtctccccattgtggtcacagtgacgctagctcttggtgttatgagaatggtgaagaaaagggccattgtgaaaaagctgcctattgttgaaactctgggctgctgtaatgtgatttgttcagataaaactggaacactgacgaagaatgaaatgactgttactcacatatttacttcagatggtctgcatgctgaggttactggagttggctataatcaatttggggaagtgattgttgatggtgatgttgttcatggattctataacccagctgttagcagaattgttgaggcgggctgtgtgtgcaatgatgctgtaattagaaacaatactctaatggggaagccaacagaaggggccttaattgctcttgcaatgaagatgggtcttgatggacttcaacaagactacatcagaaaagctgaatacccttttagctctgagcaaaagtggatggctgttaagtgtgtacaccgaacacagcaggacagaccagagatttgttttatgaaaggtgcttacgaacaagtaattaagtactgtactacataccagagcaaagggcagaccttgacacttactcagcagcagagagatgtgtaccaacaagagaaggcacgcatgggctcagcgggactcagagttcttgctttggcttctggtcctgaactgggacagctgacatttcttggcttggtgggaatcattgatccacctagaactggtgtgaaagaagctgttacaacactcattgcctcaggagtatcaataaaaatgattactggagattcacaggagactgcagttgcaatcgccagtcgtctgggattgtattccaaaacttcccagtcagtctcaggagaagaaatagatgcaatggatgttcagcagctttcacaaatagtaccaaaggttgcagtattttacagagctagcccaaggcacaagatgaaaattattaagtcgctacagaagaacggttcagttgtagccatgacaggagatggagtaaatgatgcagttgctctgaaggctgcagacattggagttgcgatgggccagactggtacagatgtttgcaaagaggcagcagacatgatcctagtggatgatgattttcaaaccataatgtctgcaatcgaagagggtaaagggatttataataacattaaaaatttcgttagattccagctgagcacgagtatagcagcattaactttaatctcattggctacattaatgaactttcctaatcctctcaatgccatgcagattttgtggatcaatattattatggatggacccccagctcagagccttggagtagaaccagtggataaagatgtcattcgtaaacctcctcgcaactggaaagacagcattttgactaaaaacttgatacttaaaatacttgtttcatcaataatcattgtttgtgggactttgtttgtcttctggcgtgagctacgagacaatgtgattacacctcgagacacaacaatgaccttcacatgctttgtgttttttgacatgttcaatgcactaagttccagatcccagaccaagtctgtgtttgagattggactctgcagtaatagaatgttttgctatgcagttcttggatccatcatgggacaattactagttatttactttcctccgcttcagaaggtttttcagactgagagcctaagcatactggatctgttgtttcttttgggtctcacctcatcagtgtgcatagtggcagaaattataaagaaggttgaaaggagcagggaaaagatccagaagcatgttagttcgacatcatcatcttttcttgaagtatga

SEQ ID NO: 208 - protein, 903 aa, human organism
MIPVLTSKKASELPVSEVASILQADLQNGLNKCEVSHRRAFHGWNEFDISEDEPLWKKYISQFKNPLIMLLLASAVISVLMHQFDDAVSITVAILIVVTVAFVQEYRSEKSLEELSKLVPPECHCVREGKLEHTLARDLVPGDTVCLSVGDRVPADLRLFEAVDLSIDESSLTGETTPCSKVTAPQPAATNGDLASRSNIAFMGTLVRCGKAKGVVIGTGENSEFGEVFKMMQAEEAPKTPLQKSMDLLGKQLSFYSFGIIGIIMLVGWLLGKDILEMFTISVSLAVAAIPEGLPIVVTVTLALGVMRMVKKRAIVKKLPIVETLGCCNVICSDKTGTLTKNEMTVTHIFTSDGLHAEVTGVGYNQFGEVIVDGDVVHGFYNPAVSRIVEAGCVCNDAVIRNNTLMGKPTEGALIALAMKMGLDGLQQDYIRKAEYPFSSEQKWMAVKCVHRTQQDRPEICFMKGAYEQVIKYCTTYQSKGQTLTLTQQQRDVYQQEKARMGSAGLRVLALASGPELGQLTFLGLVGIIDPPRTGVKEAVTTLIASGVSIKMITGDSQETAVAIASRLGLYSKTSQSVSGEEIDAMDVQQLSQIVPKVAVFYRASPRHKMKIIKSLQKNGSVVAMTGDGVNDAVALKAADIGVAMGQTGTDVCKEAADMILVDDDFQTIMSAIEEGKGIYNNIKNFVRFQLSTSIAALTLISLATLMNFPNPLNAMQILWINIIMDGPPAQSLGVEPVDKDVIRKPPRNWKDSILTKNLILKILVSSIIIVCGTLFVFWRELRDNVITPRDTTMTFTCFVFFDMFNALSSRSQTKSVFEIGLCSNRMFCYAVLGSIMGQLLVIYFPPLQKVFQTESLSILDLLFLLGLTSSVCIVAEIIKKVERSREKIQKHVSSTSSSFLEV

SEQ ID NO: 209 - DNA, 1284 bp, human organism
atgggctaccagaggcaggagcctgtcatcccgccgcagagaggattgccttattcaatgaagcaagctgggtttcctttgggaatattgcttttattctgggtttcatatgttacagacttttcccttgttttattgataaaaggaggggccctctctggaacagatacctaccagtctttggtcaataaaactttcggctttccagggtatctgctcctctctgttcttcagtttttgtatccttttatagcaatgataagttacaatataatagctggagatactttgagcaaagtttttcaaagaatcccaggagttgatcctgaaaacgtgtttattggtcgccacttcattattggactttccacagttacctttactctgcctttatccttgtaccgaaatatagcaaagcttggaaaggtctccctcatctctacaggtttaacaactctgattcttggaattgtaatggcaagggcaatttcactgggtccacacataccaaaaacagaagacgcttgggtatttgcaaagcccaatgccattcaagcggtcggggttatgtcttttgcatttatttgccaccataactccttcttagtttacagttctctagaagaacccacagtagctaagtggtcccgccttatccatatgtccatcgtgatttctgtatttatctgtatattctttgctacatgtggatacttgacatttactggcttcacccaaggggacttatttgaaaattactgcagaaatgatgacctggtaacatttggaagattttgttatggtgtcactgtcattttgacataccctatggaatgctttgtgacaagagaggtaattgccaatgtgttttttggtgggaatctttcatcggttttccacattgttgtaacagtgatggtcatcactgtagccacgcttgtgtcattgctgattgattgcctcgggatagttctagaactcaatggtgtgctctgtgcaactcccctcatttttatcattccatcagcctgttatctgaaactgtctgaagaaccaaggacacactccgataagattatgtcttgtgtcatgcttcccattggtgctgtggtgatggtttttggattcgtcatggctattacaaatactcaagactgcacccatgggcaggaaatgttctactgctttcctgacaatttctctctcacaaatacctcagagtctcatgttcagcagacaacacaactttctactttaaatattagtatctttcaactcgagtaa

SEQ ID NO: 210 - protein, 427 aa, human organism
MGYQRQEPVIPPQRGLPYSMKQAGFPLGILLLFWVSYVTDFSLVLLIKGGALSGTDTYQSLVNKTFGFPGYLLLSVLQFLYPFIAMISYNIIAGDTLSKVFQRIPGVDPENVFIGRHFIIGLSTVTFTLPLSLYRNIAKLGKVSLISTGLTTLILGIVMARAISLGPHIPKTEDAWVFAKPNAIQAVGVMSFAFICHHNSFLVYSSLEEPTVAKWSRLIHMSIVISVFICIFFATCGYLTFTGFTQGDLFENYCRNDDLVTFGRFCYGVTVILTYPMECFVTREVIANVFFGGNLSSVFHIVVTVMVITVATLVSLLIDCLGIVLELNGVLCATPLIFIIPSACYLKLSEEPRTHSDKIMSCVMLPIGAVVMVFGFVMAITNTQDCTHGQEMFYCFPDNFSLTNTSESHVQQTTQLSTLNISIFQLE

SEQ ID NO: 211 - DNA, 1203 bp, human organism
atgggctaccagaggcaggagcctgtcatcccgccgcagttttcccttgttttattgataaaaggaggggccctctctggaacagatacctaccagtctttggtcaataaaactttcggctttccagggtatctgctcctctctgttcttcagtttttgtatccttttatagcaatgataagttacaatataatagctggagatactttgagcaaagtttttcaaagaatcccaggagttgatcctgaaaacgtgtttattggtcgccacttcattattggactttccacagttacctttactctgcctttatccttgtaccgaaatatagcaaagcttggaaaggtctccctcatctctacaggtttaacaactctgattcttggaattgtaatggcaagggcaatttcactgggtccacacataccaaaaacagaagacgcttgggtatttgcaaagcccaatgccattcaagcggtcggggttatgtcttttgcatttatttgccaccataactccttcttagtttacagttctctagaagaacccacagtagctaagtggtcccgccttatccatatgtccatcgtgatttctgtatttatctgtatattctttgctacatgtggatacttgacatttactggcttcacccaaggggacttatttgaaaattactgcagaaatgatgacctggtaacatttggaagattttgttatggtgtcactgtcattttgacataccctatggaatgctttgtgacaagagaggtaattgccaatgtgttttttggtgggaatctttcatcggttttccacattgttgtaacagtgatggtcatcactgtagccacgcttgtgtcattgctgattgattgcctcgggatagttctagaactcaatggtgtgctctgtgcaactcccctcatttttatcattccatcagcctgttatctgaaactgtctgaagaaccaaggacacactccgataagattatgtcttgtgtcatgcttcccattggtgctgtggtgatggtttttggattcgtcatggctattacaaatactcaagactgcacccatgggcaggaaatgttctactgctttcctgacaatttctctctcacaaatacctcagagtctcatgttcagcagacaacacaactttctactttaaatattagtatctttcaactcgagtaa

SEQ ID NO: 212 - protein, 400 aa, human organism
MGYQRQEPVIPPQFSLVLLIKGGALSGTDTYQSLVNKTFGFPGYLLLSVLQFLYPFIAMISYNIIAGDTLSKVFQRIPGVDPENVFIGRHFIIGLSTVTFTLPLSLYRNIAKLGKVSLISTGLTTLILGIVMARAISLGPHIPKTEDAWVFAKPNAIQAVGVMSFAFICHHNSFLVYSSLEEPTVAKWSRLIHMSIVISVFICIFFATCGYLTFTGFTQGDLFENYCRNDDLVTFGRFCYGVTVILTYPMECFVTREVIANVFFGGNLSSVFHIVVTVMVITVATLVSLLIDCLGIVLELNGVLCATPLIFIIPSACYLKLSEEPRTHSDKIMSCVMLPIGAVVMVFGFVMAITNTQDCTHGQEMFYCFPDNFSLTNTSESHVQQTTQLSTLNISIFQLE

SEQ ID NO: 213 - DNA, 1140 bp, human organism
atgggctaccagaggcaggagcctgtcatcccgccgcaggtcaataaaactttcggctttccagggtatctgctcctctctgttcttcagtttttgtatccttttatagcaatgataagttacaatataatagctggagatactttgagcaaagtttttcaaagaatcccaggagttgatcctgaaaacgtgtttattggtcgccacttcattattggactttccacagttacctttactctgcctttatccttgtaccgaaatatagcaaagcttggaaaggtctccctcatctctacaggtttaacaactctgattcttggaattgtaatggcaagggcaatttcactgggtccacacataccaaaaacagaagacgcttgggtatttgcaaagcccaatgccattcaagcggtcggggttatgtcttttgcatttatttgccaccataactccttcttagtttacagttctctagaagaacccacagtagctaagtggtcccgccttatccatatgtccatcgtgatttctgtatttatctgtatattctttgctacatgtggatacttgacatttactggcttcacccaaggggacttatttgaaaattactgcagaaatgatgacctggtaacatttggaagattttgttatggtgtcactgtcattttgacataccctatggaatgctttgtgacaagagaggtaattgccaatgtgttttttggtgggaatctttcatcggttttccacattgttgtaacagtgatggtcatcactgtagccacgcttgtgtcattgctgattgattgcctcgggatagttctagaactcaatggtgtgctctgtgcaactcccctcatttttatcattccatcagcctgttatctgaaactgtctgaagaaccaaggacacactccgataagattatgtcttgtgtcatgcttcccattggtgctgtggtgatggtttttggattcgtcatggctattacaaatactcaagactgcacccatgggcaggaaatgttctactgctttcctgacaatttctctctcacaaatacctcagagtctcatgttcagcagacaacacaactttctactttaaatattagtatctttcaactcgagtaa

SEQ ID NO: 214 - protein, 379 aa, human organism
MGYQRQEPVIPPQVNKTFGFPGYLLLSVLQFLYPFIAMISYNIIAGDTLSKVFQRIPGVDPENVFIGRHFIIGLSTVTFTLPLSLYRNIAKLGKVSLISTGLTTLILGIVMARAISLGPHIPKTEDAWVFAKPNAIQAVGVMSFAFICHHNSFLVYSSLEEPTVAKWSRLIHMSIVISVFICIFFATCGYLTFTGFTQGDLFENYCRNDDLVTFGRFCYGVTVILTYPMECFVTREVIANVFFGGNLSSVFHIVVTVMVITVATLVSLLIDCLGIVLELNGVLCATPLIFIIPSACYLKLSEEPRTHSDKIMSCVMLPIGAVVMVFGFVMAITNTQDCTHGQEMFYCFPDNFSLTNTSESHVQQTTQLSTLNISIFQLE

SEQ ID NO: 215 - DNA, 1389 bp, human organism
atgggctaccagaggcaggagcctgtcatcccgccgcagagagatttagatgacagagaaacccttgtttctgaacatgagtataaagagaaaacctgtcagtctgctgctctttttaatgttgtcaactcgattataggatctggtataataggattgccttattcaatgaagcaagctgggtttcctttgggaatattgcttttattctgggtttcatatgttacagacttttcccttgttttattgataaaaggaggggccctctctggaacagatacctaccagtctttggtcaataaaactttcggctttccagggtatctgctcctctctgttcttcagtttttgtatccttttatagcaatgataagttacaatataatagctggagatactttgagcaaagtttttcaaagaatcccaggagttgatcctgaaaacgtgtttattggtcgccacttcattattggactttccacagttacctttactctgcctttatccttgtaccgaaatatagcaaagcttggaaaggtctccctcatctctacaggtttaacaactctgattcttggaattgtaatggcaagggcaatttcactgggtccacacataccaaaaacagaagacgcttgggtatttgcaaagcccaatgccattcaagcggtcggggttatgtcttttgcatttatttgccaccataactccttcttagtttacagttctctagaagaacccacagtagctaagtggtcccgccttatccatatgtccatcgtgatttctgtatttatctgtatattctttgctacatgtggatacttgacatttactggcttcacccaaggggacttatttgaaaattactgcagaaatgatgacctggtaacatttggaagattttgttatggtgtcactgtcattttgacataccctatggaatgctttgtgacaagagaggtaattgccaatgtgttttttggtgggaatctttcatcggttttccacattgttgtaacagtgatggtcatcactgtagccacgcttgtgtcattgctgattgattgcctcgggatagttctagaactcaatggtgtgctctgtgcaactcccctcatttttatcattccatcagcctgttatctgaaactgtctgaagaaccaaggacacactccgataagattatgtcttgtgtcatgcttcccattggtgctgtggtgatggtttttggattcgtcatggctattacaaatactcaagactgcacccatgggcaggaaatgttctactgctttcctgacaatttctctctcacaaatacctcagagtctcatgttcagcagacaacacaactttctactttaaatattagtatctttcaatga

SEQ ID NO: 216 - protein, 462 aa, human organism
MGYQRQEPVIPPQRDLDDRETLVSEHEYKEKTCQSAALFNVVNSIIGSGIIGLPYSMKQAGFPLGILLLFWVSYVTDFSLVLLIKGGALSGTDTYQSLVNKTFGFPGYLLLSVLQFLYPFIAMISYNIIAGDTLSKVFQRIPGVDPENVFIGRHFIIGLSTVTFTLPLSLYRNIAKLGKVSLISTGLTTLILGIVMARAISLGPHIPKTEDAWVFAKPNAIQAVGVMSFAFICHHNSFLVYSSLEEPTVAKWSRLIHMSIVISVFICIFFATCGYLTFTGFTQGDLFENYCRNDDLVTFGRFCYGVTVILTYPMECFVTREVIANVFFGGNLSSVFHIVVTVMVITVATLVSLLIDCLGIVLELNGVLCATPLIFIIPSACYLKLSEEPRTHSDKIMSCVMLPIGAVVMVFGFVMAITNTQDCTHGQEMFYCFPDNFSLTNTSESHVQQTTQLSTLNISIFQ

SEQ ID NO: 217 - DNA, 3501 bp, human organism
atggaggatgccttcggggcagccgtggtgaccgtgtgggacagcgatgcacacaccacggagaagcccaccgatgcctacggagagctggacttcacgggggccggccgcaagcacagcaatttcctccggctctctgaccgaacggatccagctgcagtttatagtctggtcacacgcacatggggcttccgtgccccgaacctggtggtgtcagtgctggggggatcggggggccccgtcctccagacctggctgcaggacctgctgcgtcgtgggctggtgcgggctgcccagagcacaggagcctggattgtcactgggggtctgcacacgggcatcggccggcatgttggtgtggctgtacgggaccatcagatggccagcactgggggcaccaaggtggtggccatgggtgtggccccctggggtgtggtccggaatagagacaccctcatcaaccccaagggctcgttccctgcgaggtaccggtggcgcggtgacccggaggacggggtccagtttcccctggactacaactactcggccttcttcctggtggacgacggcacacacggctgcctggggggcgagaaccgcttccgcttgcgcctggagtcctacatctcacagcagaagacgggcgtgggagggactggaattgacatccctgtcctgctcctcctgattgatggtgatgagaagatgttgacgcgaatagagaacgccacccaggctcagctcccatgtctcctcgtggctggctcagggggagctgcggactgcctggcggagaccctggaagacactctggccccagggagtgggggagccaggcaaggcgaagcccgagatcgaatcaggcgtttctttcccaaaggggaccttgaggtcctgcaggcccaggtggagaggattatgacccggaaggagctcctgacagtctattcttctgaggatgggtctgaggaattcgagaccatagttttgaaggcccttgtgaaggcctgtgggagctcggaggcctcagcctacctggatgagctgcgtttggctgtggcttggaaccgcgtggacattgcccagagtgaactctttcggggggacatccaatggcggtccttccatctcgaagcttccctcatggacgccctgctgaatgaccggcctgagttcgtgcgcttgctcatttcccacggcctcagcctgggccacttcctgaccccgatgcgcctggcccaactctacagcgcggcgccctccaactcgctcatccgcaaccttttggaccaggcgtcccacagcgcaggcaccaaagccccagccctaaaagggggagctgcggagctccggccccctgacgtggggcatgtgctgaggatgctgctggggaagatgtgcgcgccgaggtacccctccgggggcgcctgggaccctcacccaggccagggcttcggggagagcatgtatctgctctcggacaaggccacctcgccgctctcgctggatgctggcctcgggcaggccccctggagcgacctgcttctttgggcactgttgctgaacagggcacagatggccatgtacttctgggagatgggttccaatgcagtttcctcagctcttggggcctgtttgctgctccgggtgatggcacgcctggagcctgacgctgaggaggcagcacggaggaaagacctggcgttcaagtttgaggggatgggcgttgacctctttggcgagtgctatcgcagcagtgaggtgagggctgcccgcctcctcctccgtcgctgcccgctctggggggatgccacttgcctccagctggccatgcaagctgacgcccgtgccttctttgcccaggatggggtacagtctctgctgacacagaagtggtggggagatatggccagcactacacccatctgggccctggttctcgccttcttttgccctccactcatctacacccgcctcatcaccttcaggaaatcagaagaggagcccacacgggaggagctagagtttgacatggatagtgtcattaatggggaagggcctgtcgggacggcggacccagccgagaagacgccgctgggggtcccgcgccagtcgggccgtccgggttgctgcgggggccgctgcggggggcgccggtgcctacgccgctggttccacttctggggcgcgccggtgaccatcttcatgggcaacgtggtcagctacctgctgttcctgctgcttttctcgcgggtgctgctcgtggatttccagccggcgccgcccggctccctggagctgctgctctatttctgggctttcacgctgctgtgcgaggaactgcgccagggcctgagcggaggcgggggcagcctcgccagcgggggccccgggcctggccatgcctcactgagccagcgcctgcgcctctacctcgccgacagctggaaccagtgcgacctagtggctctcacctgcttcctcctgggcgtgggctgccggctgaccccgggtttgtaccacctgggccgcactgtcctctgcatcgacttcatggttttcacggtgcggctgcttcacatcttcacggtcaacaaacagctggggcccaagatcgtcatcgtgagcaagatgatgaaggacgtgttcttcttcctcttcttcctcggcgtgtggctggtagcctatggcgtggccacggaggggctcctgaggccacgggacagtgacttcccaagtatcctgcgccgcgtcttctaccgtccctacctgcagatcttcgggcagattccccaggaggacatggacgtggccctcatggagcacagcaactgctcgtcggagcccggcttctgggcacaccctcctggggcccaggcgggcacctgcgtctcccagtatgccaactggctggtggtgctgctcctcgtcatcttcctgctcgtggccaacatcctgctggtcaacttgctcattgccatgttcagttacacattcggcaaagtacagggcaacagcgatctctactggaaggcgcagcgttaccgcctcatccgggaattccactctcggcccgcgctggccccgccctttatcgtcatctcccacttgcgcctcctgctcaggcaattgtgcaggcgaccccggagcccccagccgtcctccccggccctcgagcatttccgggtttacctttctaaggaagccgagcggaagctgctaacgtgggaatcggtgcataaggagaactttctgctggcacgcgctagggacaagcgggagagcgactccgagcgtctgaagcgcacgtcccagaaggtggacttggcactgaaacagctgggacacatccgcgagtacgaacagcgcctgaaagtgctggagcgggaggtccagcagtgtagccgcgtcctggggtgggtggccgaggccctgagccgctctgccttgctgcccccaggtgggccgccaccccctgacctgcctgggtccaaagactga

SEQ ID NO: 218 - protein, 1166 aa, human organism [sequence omitted]

SEQ ID NO: 219 - DNA, 894 bp, human organism
atggagccgcgggcgctcgtcacggcgctcagcctcggcctcagcctgtgctccctggggctgctcgtcacggccatcttcaccgaccactggtacgagaccgacccccggcgccacaaggagagctgcgagcgcagccgcgcgggcgccgaccccccggaccagaagaaccgcctgatgccgctgtcgcacctgccgctgcgggactcgcccccgctggggcgccggctgctcccgggcggcccggggcgcgccgaccccgagtcctggcgctcgctcctggggctcggcgggctggacgccgagtgcggccggcccctcttcgccacctactcgggcctctggaggaagtgctacttcctgggcatcgaccgggacatcgacaccctcatcctgaaaggtattgcgcagcgatgcacggccatcaagtaccacttttctcagcccatccgcttgcgaaacattccttttaatttaaccaagaccatacagcaagatgagtggcacctgcttcatttaagaagaatcactgctggcttcctcggcatggccgtagccgtccttctctgcggctgcattgtggccacagtcagtttcttctgggaggagagcttgacccagcacgtggctggactcctgttcctcatgacagggatattttgcaccatttccctctgtacttatgccgccagtatctcgtatgatttgaaccggctcccaaagctaatttatagcctgcctgctgatgtggaacatggttacagctggtccatcttttgcgcctggtgcagtttaggctttattgtggcagctggaggtctctgcatcgcttatccgtttattagccggaccaagattgcacagctaaagtctggcagagactccacggtatga

SEQ ID NO: 220 - protein, 297 aa, human organism
MEPRALVTALSLGLSLCSLGLLVTAIFTDHWYETDPRRHKESCERSRAGADPPDQKNRLMPLSHLPLRDSPPLGRRLLPGGPGRADPESWRSLLGLGGLDAECGRPLFATYSGLWRKCYFLGIDRDIDTLILKGIAQRCTAIKYHFSQPIRLRNIPFNLTKTIQQDEWHLLHLRRITAGFLGMAVAVLLCGCIVATVSFFWEESLTQHVAGLLFLMTGIFCTISLCTYAASISYDLNRLPKLIYSLPADVEHGYSWSIFCAWCSLGFIVAAGGLCIAYPFISRTKIAQLKSGRDSTV

SEQ ID NO: 221 - DNA, 1134 bp, human organism
atgaggcgactgaatcggaaaaaaactttaagtttggtaaaagagttggatgcctttccgaaggttcctgagagctatgtagagacttcagccagtggaggtacagtttctctaatagcatttacaactatggctttattaaccataatggaattctcagtatatcaagatacatggatgaagtatgaatacgaagtagacaaggatttttctagcaaattaagaattaatatagatattactgttgccatgaagtgtcaatatgttggagcggatgtattggatttagcagaaacaatggttgcatctgcagatggtttagtttatgaaccaacagtatttgatctttcaccacagcagaaagagtggcagaggatgctgcagctgattcagagtaggctacaagaagagcattcacttcaagatgtgatatttaaaagtgcttttaaaagtacatcaacagctcttccaccaagagaagatgattcatcacagtctccaaatgcatgcagaattcatggccatctatatgtcaataaagtagcagggaattttcacataacagtgggcaaggcaattccacatcctcgtggtcatgcacatttggcagcacttgtcaaccatgaatcttacaatttttctcatagaatagatcatttgtcttttggagagcttgttccagcaattattaatcctttagatggaactgaaaaaattgctatagatcacaaccagatgttccaatattttattacagttgtgccaacaaaactacatacatataaaatatcagcagacacccatcagttttctgtgacagaaagggaacgtatcattaaccatgctgcaggcagccatggagtctctgggatatttatgaaatatgatctcagttctcttatggtgacagttactgaggagcacatgccattctggcagttttttgtaagactctgtggtattgttggaggaatcttttcaacaacaggcatgttacatggaattggaaaatttatagttgaaataatttgctgtcgtttcagacttggatcctataaacctgtcaattctgttccttttgaggatggccacacagacaaccacttacctcttttagaaaataatacacattga

SEQ ID NO: 222 - protein, 377 aa, human organism
MRRLNRKKTLSLVKELDAFPKVPESYVETSASGGTVSLIAFTTMALLTIMEFSVYQDTWMKYEYEVDKDFSSKLRINIDITVAMKCQYVGADVLDLAETMVASADGLVYEPTVFDLSPQQKEWQRMLQLIQSRLQEEHSLQDVIFKSAFKSTSTALPPREDDSSQSPNACRIHGHLYVNKVAGNFHITVGKAIPHPRGHAHLAALVNHESYNFSHRIDHLSFGELVPAIINPLDGTEKIAIDHNQMFQYFITVVPTKLHTYKISADTHQFSVTERERIINHAAGSHGVSGIFMKYDLSSLMVTVTEEHMPFWQFFVRLCGIVGGIFSTTGMLHGIGKFIVEIICCRFRLGSYKPVNSVPFEDGHTDNHLPLLENNTH

SEQ ID NO: 223 - DNA, 3407 bp, human organism
cgcgcgtctccgccgcccgcgtgacttctgcctgcgctccttctctgaacgctcacttccgaggagacgccgacgatgaagacaccgtggaagattcttctgggactgctgggtgctgctgcgcttgtcaccatcatcaccgtgcccgtggttctgctgaacaaaggcacagatgatgctacagctgacagtcgcaaaacttacactctaactgattacttaaaaaatacttatagactgaagttatactccttaagatggatttcagatcatgaatatctctacaaacaagaaaataatatcttggtattcaatgctgaatatggaaacagctcagttttcttggagaacagtacatttgatgagtttggacattctatcaatgattattcaatatctcctgatgggcagtttattctcttagaatacaactacgtgaagcaatggaggcattcctacacagcttcatatgacatttatgatttaaataaaaggcagctgattacagaagagaggattccaaacaacacacagtgggtcacatggtcaccagtgggtcataaattggcatatgtttggaacaatgacatttatgttaaaattgaaccaaatttaccaagttacagaatcacatggacggggaaagaagatataatatataatggaataactgactgggtttatgaagaggaagtcttcagtgcctactctgctctgtggtggtctccaaacggcacttttttagcatatgcccaatttaacgacacagaagtcccacttattgaatactccttctactctgatgagtcactgcagtacccaaagactgtacgggttccatatccaaaggcaggagctgtgaatccaactgtaaagttctttgttgtaaatacagactctctcagctcagtcaccaatgcaacttccatacaaatcactgctcctgcttctatgttgataggggatcactacttgtgtgatgtgacatgggcaacacaagaaagaatttctttgcagtggctcaggaggattcagaactattcggtcatggatatttgtgactatgatgaatccagtggaagatggaactgcttagtggcacggcaacacattgaaatgagtactactggctgggttggaagatttaggccttcagaacctcattttacccttgatggtaatagcttctacaagatcatcagcaatgaagaaggttacagacacatttgctatttccaaatagataaaaaagactgcacatttattacaaaaggcacctgggaagtcatcgggatagaagctctaaccagtgattatctatactacattagtaatgaatataaaggaatgccaggaggaaggaatctttataaaatccaacttattgactatacaaaagtgacatgcctcagttgtgagctgaatccggaaaggtgtcagtactattctgtgtcattcagtaaagaggcgaagtattatcagctgagatgttccggtcctggtctgcccctctatactctacacagcagcgtgaatgataaagggctgagagtcctggaagacaattcagctttggataaaatgctgcagaatgtccagatgccctccaaaaaactggacttcattattttgaatgaaacaaaattttggtatcagatgatcttgcctcctcattttgataaatccaagaaatatcctctactattagatgtgtatgcaggcccatgtagtcaaaaagcagacactgtcttcagactgaactgggccacttaccttgcaagcacagaaaacattatagtagctagctttgatggcagaggaagtggttaccaaggagataagatcatgcatgcaatcaacagaagactgggaacatttgaagttgaagatcaaattgaagcagccagacaattttcaaaaatgggatttgtggacaacaaacgaattgcaatttggggctggtcatatggagggtacgtaacctcaatggtcctgggatcgggaagtggcgtgttcaagtgtggaatagccgtggcgcctgtatcccggtgggagtactatgactcagtgtacacagaacgttacatgggtctcccaactccagaagacaaccttgaccattacagaaattcaacagtcatgagcagagctgaaaattttaaacaagttgagtacctccttattcatggaacagcagatgataacgttcactttcagcagtcagctcagatctccaaagccctggtcgatgttggagtggatttccaggcaatgtggtatactgatgaagaccatggaatagctagcagcacagcacaccaacatatatatacccacatgagccacttcataaaacaatgtttctctttaccttagcacctcaaaataccatgccatttaaagcttattaaaactcatttttgttttcattatctcaaaactgcactgtcaagatgatgatgatctttaaaatacacactcaaatcaagaaacttaaggttacctttgttcccaaatttcatacctatcatcttaagtagggacttctgtcttcacaacagattattaccttacagaagtttgaattatccggtcgggttttattgtttaaaatcatttctgcatcagctgctgaaacaacaaataggaattgtttttatggaggctttgcatagattccctgagcaggattttaatctttttctaactggactggttcaaatgttgttctcttctttaaagggatggcaagatgtgggcagtgatgtcactagggcagggacaggataagagggattagggagagaagatagcagggcatggctgggaacccaagtccaagcataccaacacgagcaggctactgtcagctcccctcggagaagagctgttcaccacgagactggcacagttttctgagaaagactattcaaacagtctcaggaaatcaaatatcgaaagcactgacttctaagtaaaccacagcagttgaaagactccaaagaaatgtaagggaaactgccagcaacgcagcccccaggtgccagttatggctataggtgctacaaaaacacagcaagggtgatgggaaagcattgtaaatgtgcttttaaaaaaaaatactgatgttcctagtgaaagaggcagcttgaaactgagatgtgaacacatcagcttgccctgttaaaagatgaaaatatttgtatcacaaatcttaacttgaaggagtccttgcatcaatttttcttatttcatttctttgagtgtcttaattaaaagaatattttaacttccttggactcattttaaaaaatggaacataaaatacaatgttatgtattattattcccattctacatactatggaatttctcccagtcatttaataaatgtgccttcattttttc

SEQ ID NO: 224 - protein, 766 aa, human organism [sequence omitted]

SEQ ID NO: 225 - DNA, 261 bp, human organism
atggctctggcgaaggtgagggagccaaacgcaaatgacaatgccatcagagttgacaacagaagtgtgattaaagtgcgtgctaaccagtgttccctgcatgaggcagaaagtgaatccagaaaccctcaggagctctggatgggcctgctcctcttgatgggggtcctagaagcatgtgtggaaatgaggcctctgtcagtctggtccctgagagatgacaaggagcagagcccccaccagcccacactggatgtctaa

SEQ ID NO: 226 - protein, 86 aa, human organism
MALAKVREPNANDNAIRVDNRSVIKVRANQCSLHEAESESRNPQELWMGLLLLMGVLEACVEMRPLSVWSLRDDKEQSPHQPTLDV

SEQ ID NO: 227 - DNA, 462 bp, human organism
atgccaaatgctgagttagaagcaaagagccttggaagcagtaaatgtttaaaaactgctctcatacttgctgtatgttgtggatcagcaaatatagtcagccctctacttgagcaaaatattgatgtatcttctcaagatctggacagacggccagagagtatgctgtttctagtcatcatcatgtggaccagttttgtggaagacaatctttccatgggctgggggaagctagaagattttatggctattgaagaagaaatgaagaagcacggaagtactcatgtgggattcccagaaaacctgactaatggtgccgctgctggcaatggtgatgatggattaattcctccaaggaagagcagaacacctgaaagccagcaatttcctgacactgagaatgaagagtatcacaggtttgtcaaagatcagatagttgtagatatgcggcgttatttctga

SEQ ID NO: 228 - protein, 153 aa, human organism [sequence omitted]

SEQ ID NO: 229 - DNA, 12880 bp, human organism
gactgcttgcattaaaggacttcctcatcctttttttcatgaaactgagcttgcttaatcagagatggagcaaactgactgcaaaccctaccagcctctaccaaaagtcaagcatgaaatggatctagcttacaccagttcttctgatgagagtgaagatggaagaaaaccaagacagtcatacaactccagggagaccctgcacgagtataaccaggagctgaggatgaattacaatagccagagtagaaagaggaaagaagtagaaaaatctactcaagagatggaattctgtgaaacctctcacactctgtgctctggctaccaaacagacatgcacagcgtttctcggcatggctaccagctagagatgggatctgatgtggacacagagacagaaggtgctgcctcacctgaccatgcactaagaatgtggataaggggaatgaaatcagagcatagttcctgtttgtccagccgggccaactctgcattatccttgactgacactgaccatgaaaggaagtctgatggggaaaatggtttcaaattctctcctgtttgttgtgacatggaggctcaagctgggtctactcaagatgtgcagagcagcccacacaaccagttcaccttcagacccctcccaccgccacctccgcctcctcatgcctgcacctgtgccaggaagccaccccctgcagcggactctcttcagaggagatcaatgactacccgcagccagcccagcccagctgctccagctcccccaaccagcacgcaggattcagtccatctgcataacagctgggtcctgaacagcaacataccattggagaccaggcattccctgttcaaacatggatctggttcctctgcgatcttcagtgcagccagtcagaactaccctctgacatccaataccgtgtactcgccccctcccaggcctcttcctcgaagcaccttttcccgacctgcctttacctttaacaaaccttacaggtgctgcaactggaagtgcacagcattgagcgccactgcaatcacagtgactttggccttgttactagcctatgtgattgcagtgcatttgttcggcctgacttggcagttgcaaccagttgaaggagagctgtatgcaaatggagttagcaaagggaacagggggaccgagtccatggacactacttactctccaattggaggaaaagtttctgataaatcagagaaaaaagtgtttcagaagggacgggcgatagacactggagaagttgacattggtgcacaggtcatgcagaccattccacctggtttattctggcgtttccagattactatccaccatccaatatatctgaagttcaatatttctttagccaaggactctctgctgggaatttatggcagaagaaacattccacctacacatactcagtttgattttgtaaaactaatggatggcaaacagctggtcaagcaggactccaagggctctgatgatacacagcactcccctcggaacctgatcttaacttcgcttcaggagacaggtttcatagagtatatggatcaaggaccttggtatctggcgttttacaatgatggaaaaaagatggagcaagtattcgtgttaactacagcaattgaaataatggatgactgttcaaccaattgcaatggaaatggagagtgtatctctggccattgtcattgtttcccaggattccttggacctgactgtgctagagattcctgccctgtgctgtgtggtgggaatggagaatacgagaaaggacactgtgtctgccggcatggctggaaggggccagagtgtgacgttccggaagaacaatgcattgatccaacatgctttggccacggcacctgcatcatgggagtctgcatctgtgtgccaggatacaaaggagaaatatgcgaggaagaggactgcctagacccaatgtgttccaaccatggcatctgtgtaaaaggagaatgtcactgttctactggctggggaggagttaactgtgaaacaccacttcctgtatgtcaagagcagtgctcaggacacggaacttttcttctggacgctggagtatgcagctgtgatcccaagtggacaggatctgactgctcaacagagctgtgtaccatggagtgtggtagccatggagtctgctcaagaggaatttgccagtgtgaagaaggctgggtaggaccaacatgtgaggaacgctcctgtcattctcattgtactgagcatggccaatgcaaagatggaaaatgtgagtgtagccctggatgggagggcgaccactgcacaattgctcactacttagatgctgtccgagatggctgcccagggctctgctttggaaatggacgatgtaccctggatcaaaatggttggcactgtgtgtgtcaggtgggttggagtgggacaggctgcaatgttgtcatggaaatgctttgtggagataacttggacaatgatggagatggtttaaccgactgtgtggatcctgactgttgtcaacaaagcaactgttatataagtcctctctgccagggctcaccagatcctcttgacctcattcagcaaagccaaactctcttctctcagcacacttcaagacttttttatgatcgaatcaaattcctcattggcaaggacagtactcatgtcattcctcctgaggtgtcatttgacagcaggcgtgcctgtgtgattcgaggccaagtggtggccatagatggaactcctctagtgggagtgaatgtcagtttcttgcaccacagtgattatgggtttaccatcagccggcaagatggaagctttgacctcgtggccatcggtggcatctctgtcatcttaatcttcgaccgatcccctttcctgcctgagaagagaacactctggttgccttggaatcagtttattgtggtagagaaagtcaccatgcagagagttgtatcagacccgccatcctgcgatatctccaactttatcagcccaaaccctattgtgcttccttcaccgctcacatcatttggagggtcctgtccagagaggggaactattgttcctgagctgcaggttgtacaggaggaaattcccattccctccagctttgtgaggctgagttacctgagcagccgcacccctgggtataaaaccctgctacggatccttctgacacattcaacgattcccgtaggcatgataaaagtacacctcacagtagctgtggaagggcgactcacacagaagtggtttcccgccgcaattaatcttgtctacacatttgcttggaacaagaccgatatctatggacagaaggtttggggcctggcagaggctttggtatctgtgggatatgaatatgaaacgtgccctgactttattctctgggagcaaaggacagtcgttttacaaggttttgagatggatgcttctaacctaggagactggtctttgaataagcatcacattttgaatcctcaaagtggaatcatacataaagggaatggagaaaatatgttcatttcccagcagcccccagtcatatcaaccataatgggtaatggacaccaaaggagtgtagcctgcaccaactgcaatggcccagcccacaacaacaaactctttgctcctgtcgccttagcttctggccctgatggcagtgtgtatgttggcgacttcaattttgtaaggagaatatttccctcgggaaactccgttagtattttggaattaagcacaagtcctgctcacaaatactatctggctatggaccctgtgtctgaatcactctatctatcagacaccaatactcgcaaagtctacaagttgaaatctcttgtggagacgaaagatctgtccaagaattttgaagtggtggcaggaactggtgatcagtgccttccctttgaccagagtcattgtggagatggtgggagagcatcggaagcttcactgaatagccctcgaggcatcacagttgataggcatggatttatttactttgtggatgggactatgattcgcaaaattgatgagaatgctgtgatcacaactgtaatcggctcaaatggtctgacttccacacaaccactgagctgtgactcaggaatggacatcactcaggtgcgattagagtggccaacagaccttgcagtaaatcctatggacaattcattgtatgtcttggataacaacattgtgctgcaaatttctgagaacaggcgtgttcggatcatcgcaggacgccccattcactgccaggtgccaggcatcgatcatttcctggtcagcaaggtagcaattcactccactctagagtcagcgagggccatcagtgtctcccacagcgggctgctcttcatagctgaaacagacgagaggaaagtaaaccgcattcagcaagtaaccaccaatggggagatctacatcatcgctggtgcccccactgactgtgactgcaaaattgatccaaactgtgactgtttttcaggtgatggtggctatgccaaagatgcaaagatgaaagccccttcctccttagcagtgtcgcctgatggaaccctctatgtggcagacctcggaaatgttcgaattcgtaccatcagcaggaaccaagcccacctgaatgacatgaacatttatgagattgcttcacccgctgatcaggaactgtaccagttcactgtaaatggaacccacctacacaccctgaacttgataacaagggactatgtttataacttcacctacaattctgaaggtgacttgggcgcgattaccagcagcaatggcaattcagtgcacattcgccgtgatgcaggcggaatgccgctatggcttgtggtgcctggcggacaagtatactggctgactataagcagcaatggagtcctgaaaagagtgtcagcccaaggctataatccggccttaatgacctatccaggaaacacagggcttctggctaccaaaagtaacgaaaatggatggacaaccgtttatgagtatgaccccgagggacacctgaccaatgcaacgtttcccactggagaggtcagcagcttccacagtgacctggagaagctgacaaaagtggagctagatacttccaaccgtgaaaatgtcctcatgtcaaccaacttgacggcaactagtaccatatatattttaaaacaagaaaatactcaaagtacctatcgggtgaatccagatggttccctgcgtgtcacttttgccagcgggatggagatcggcctcagctcagagccccacatcctggcaggggcagtcaaccctaccctgggcaaatgcaacatctcattgcccggagagcacaatgcaaacctcatcgagtggcggcagaggaaggagcaaaacaaaggcaatgtttcggcttttgaaaggaggctgagggcccacaacagaaacctactctccatagattttgatcatataacccgcacaggaaagatctatgatgaccatcgaaaattcacccttcgaattctttatgaccagactgggcgacccattctgtggtctcctgtaagcagatataatgaagtgaacatcacatattcaccttcgggattggtgacgtttattcaaagaggaacgtggaatgaaaaaatggaatatgaccagagtgggaaaattatttcaagaacttgggctgatgggaaaatttggagctatacctacttagaaaaatctgtgatgcttctcctacacagccagcggcgttacatctttgagtatgaccaatcagattgcctgctgtcagttaccatgcctagcatggtgcgccacagcttacaaaccatgctttcagtgggctactaccgtaatatctacaccccaccggacagtagcacttcttttatccaagactatagtcgagatggccgattgctacagaccctgcatctggggacagggcgcagagtcttatacaagtacaccaagcaagcaaggctttctgaggttctctatgataccactcaggtcacattaacatatgaagagtcttctggagtgattaagacaatacacctgatgcatgacggattcatctgcacaatcagatacaggcaaacaggacctcttattggacgccagattttcagattcagtgaagaaggccttgtgaatgcacggttcgactacagctacaacaatttccgagtcacaagcatgcaagctgtaatcaatgaaacccctttgcctatagatctttaccgatatgttgatgtctctggcagaacagagcagtttggaaaattcagtgtaattaattacgatttaaatcaggtcataactactacagtgatgaaacacaccaaaatcttcagtgccaatggacaagtcattgaagtccaatatgaaatcctaaaggcaattgcctactggatgaccattcaatatgataatgtgggccgacatggtaatatgtgcataagggtaggagtagatgccaatataacaaggtacttctatgaatacgatgctgatgggcaacttcagactgtttctgtaaatgacaaaacccagtggcgttatagttacgatctgaatggagacatcaacctcttaagccatgggaagagtgctcgtcttactcctctccgatatgacctccgagaccgcatcaccagattaggagaaattcagtataaaatggatgaagatggctttctgaggcagaggggaaatgatatttttgaatataattctaatggcctgctgcagaaagcctacaataaggcttctggctggactgtgcagtattactatgatgggcttgggcgacgtgtcgcgagtaagtccagcctagggcagcaccttcagttctttgtcgacgcgaccgcgaaccccataagagttactcatttgtacaaccacacaagctcggagattacatctctgtattatgatctccaaggtcaccttattgccatggagttaagcagtggtgaagaatattatgtagcctgtgataatacaggtaccccactagctgtgttcagcagccgaggtcaggtcataaaggagatactatacacaccttatggcgatatctatcatgacacttaccctgactttcaggtcataattggttttcatggaggactctatgatttccttactaaattagtgcacctggggcaaagggattatgatgttgttgctggcagatggacaacggcctatcatcacatatggaaacagttgaacctccttcctaaaccattcaacctctactcctttgaaaataactacccagttggcaaaattcaagatgttgcaaagtataccacagacatcagaagttggttggagctatttggtttccaattacacaatgtactacctggatttcccaaacctgaattagaaaatttagaattaacttacgagcttctacggcttcagacaaaaactcaagagtgggatcctggaaagactatcctgggcattcagtgtgaactccagaaacagctcaggaatttcatttccttggaccaactacctatgactccccgatacaatgatggacggtgccttgaaggagggaagcaaccaaggtttgctgctgtcccttctgtttttgggaaaggtataaaatttgccatcaaggatggcatagtaacagctgatattataggagtagccaatgaagatagcaggcggcttgctgccattctcaataatgcccattacctggaaaacctacattttaccatagaggggagggacactcactacttcattaagcttgggtctctggaggaagacctggtgctcatcggtaacactggggggaggcggattctggagaatggtgtcaatgtcactgtgtcccagatgacttctctgttgaatgggaggactagacggtttgcagatattcagctccagcatggagccctgtgcttcaacatccggtatgggacaactgtcgaagaggaaaagaatcacgtgttggagattgccagacagcgcgcagtggcccaggcctggactaaggaacaaagaaggctgcaagagggggaagaggggattagggcatggacagaaggggaaaagcagcagcttttgagcactgggcgggtacaaggttacgatgggtattttgttttgtctgttgagcagtatttagaactttctgacagtgccaataatattcactttatgagacagagcgaaataggcaggaggtaacaaaaatatctctgcctttgcgtcaccaaagactgcctgtttttaaaacataaaatggtttattgtattggttttctagatcagaactctgtatatgtaaatatggaggaaaaacatatccaactgcctttcaatgtgacggaagatggtattttaatattgtttgtttaaactctttaagaaatgacagagatttttagttcttgtgtggcagtattcaaaataacacaagtagaactcaaacagctaaaaacagttttcagaaagcaccactttcaatttgccgagccatgcatatgttccaatatccagaaagaacccaaggttctctatctctattgtgagaagcagtttcatccttaactgttggcagaacttacgggctatttgaataggtggtgcaatagtatctgaaacttgcctttcgaaagactgccagccctttgacgttttccagatctgttataggaaacttaaaaacaggtgtaaaatgtcttcagccaccatctcctagagtgaggacccaattgcccttccttcttgattattcctccttgcttgttaaagtaaatgccatattgttgtgctgtgttttggcgtgtggtggctgggttctgtctaccatgcttccctgtgggtgtggtaaccagactgtatagccgctatttgctcgtgtgtacatgataccaaagcagctggccagcgtgacctctctcacacgacctgttttgactcaattttttactaaaagttgttcagctgtattggtatcatgtaaacatagcttttattaacctgggtaggaatttctcatttatatataggatgtgttttggtcatagtttcacattagtgattcagtatctatacactgacccaatggttttgtgcacatgaacggtaatttacttaaaagtatgattctggtacaaaaacaaacaaaggctttagcaggcatacgtgtctgggatgccgatacatacattaactactactgcagaaattcataagagccaaaaccttaaaaaaatagacctggtacttaagtgaaagtactaaagggaagaccagaccaaacatcacagcagttgctgccacattgtttcagcccacttagatttatctttcaaatgtacaattctgtattgaacatctcccagccatcttcaggaaatcgaatcaagtaaatcctttccaaccgaaaacatttcaactaactatagagaggcagactcatttttactaaaataatttatacagttagttattttcgttctccgtacttacccatttatctttatttaatcgtctctactgcctaggaaaataactattttccaggacgggttatttgttctgcgatcatttaaaatttggagaaaggtcaggattagtgttaatatcagctgcagtttctcaatctctaggaatcctgcagtaaaacaagccccttggtgagctggaagatttgtgcccagtgacaaagagatagtttgtaaaatgctgtgtaattgtaagttaccacaaatgaaaatacatgacagcacaatgtggcccgtagaaaattcccctgagccagcttctgcactttcatcaccgaatctgaacatttgctatgtctgaaggcaaatttatgatggaatgttagtttggattctttccagatgctacctaaatgcagtgtggggtcattgccttgctttgcgatgacagtttctttgaaaatatgcaaagtcataagctcatgttaaggtttttcaagagtctgcctcctactacacaaaggaaagcaagggaaaggaaatgaccctggcaaacagtagggaagggtgtattcaaacatttcattttcaaaaccttcgggttagaataccacttacacatgtattctgagagacagaattcatgaggaactcatctctctttataactggaaacacaccagcttgatatattgctaatccatactaaaatcatattattgggttttttctgaatcaggcctgtattaatggtacagtatttattcagaatggaattctaaaattactaacaaacttgttgaaaatttgaatacctccacaccaacctaaaaatggaccttaagttcctagaacctctgatgttcttttaaattaatggaaaaataatttgtgaactgtatatagagagtgcattcataaatgtgattatgtattttatcacaaatccaaaatgtcaatattagagtctattttgcttatattttaagcaattatacgtttttgcaattcattgatgatgtatcattttcaaactgctttaaatatccattagaaacaaatatttgaagcttttacttaatagtgattaccttgaactgtgcatttctagtttgtaatacgtatttggttggttcgtgcctttagtttgttaaagttacatttgtattatattcaggaaatgcactttttattacttacagctgtggttttaatactgccttgaactattattattctttttacaactcctaaagcttgagggaggaaagaaaaaaaaaacaaaactactaatcagtagtaaatcgaagagaaacattttggcatttcttaagaagaagatggagatattgagtatatcacttcctattcagctgaatagaaagaatgccttcattgacttgcagttctgcagtttaaattattgaaagaacaattcgtttgcatttcctgatgaaagtaaaagcatttttcagagaaacatatgaatttctcatacccagcagacagatggctgacactgcacagccacacaccattcgagtaagttaaagtgagagcatagtagttggactctcctatgaagaacattctgggctggaggcagggaatactccatggttgtttctttttcctacttaagcccattttgtttgtgcttttctgttttgttttgttttcactcttgcactacagtctagagatccaaatgaactgaaaagttcaaagtttaacacatttaaatatgtttacttttagttgtcattctaatcgttattgattagaagcatgactcctgaaggaaagggaaataaatctcaattcatactaacttgcaacaaaacacttttaccatataaataagtatatgatttatttttaacccaaaaaatgtataaaataagtgtgtcctttactgtcaatttatcgagaagatctataatatatagactacatatatataatatatacaacatagccaaatgtatgaaaacttgacaatgtataatttggaattcacatgctacctatgtagacaggtatgaaattaagttataattttcatgagacattttcatcactgttgacacagtttcaaggcattccatcatgttattttgactctttttcttttttttttctttaaaaatatatttttaactagaccaggccccactataatatcacttaagagagtcagggcaaagtttttgcatttatgaagatgtgttcatgtaagggtgattgtaatggagttcattggtaatagaagcaaaagtacagtaacgaagtattgaaaagaaaattttggagacattggagcatattatatatagcttgtggaaagacataaggctacagatggaatggaacattcctgttttcttgaagaaattcacatacacatagctgacctgactagtacttcagctcttccacagccttctataaaggttctttcttctgcaaagaaaacaaaacaaaacaaaacaaaacaaaaaaaaacaaaaaaagcgcaaaaaacaaaaaaacaaaaaaaagcaaagtaaaatttaaaaatacagaaaacaaacaacaaaaaagaattcaaccataaatagtgactattattttcagtgtgtccttcatgtgaaagctattaaggaccaaatatactactgttcataagaagaaattactttctaaacagtaactgaaaatacttagagttaaacttgctgtggattttgtcttggcagttgtcatcttacattatttgtcaaaggaaatgtgtttggcagttaaaaatctttccttagatttagtggtggactttaacctcttaaataaatgttagtatatcagattgtgtccttgaaaaatattttacttgtatgaatcatgacaacgtctaaatctttactattcttctggcaaaagcatcagtaagaaagaaggcgaaaaagagaagtatagcctttatgtcagaaaaacattctttttagctgcttactttctcatgaaaagtaaagatgtttacagtgtatgccaagttttcagtttctgtataacaacaggtagaggttctaatcatattgaaaattgtgttataatggtctgagccatgttgctaggaaacaataggttccaattttgtattcctgctctcctgtgctgaaaagtgactggatactgtacaggttcatgttctctggctgcagttaaatggtcttttgcattttgctctggctttcaggccagaagcatgcatttttctacaagagcatcacaacaacatgctgtaaatatttaaagttaaacattatgtgttgatatttgaaagaaaagtactttgaatatttcatttttaaaaaataaaattgccaatgaaaaaaaa

SEQ ID NO: 230 - protein, 2725 aa, human organism
MEQTDCKPYQPLPKVKHEMDLAYTSSSDESEDGRKPRQSYNSRETLHEYNQELRMNYNSQSRKRKEVEKSTQEMEFCETSHTLCSGYQTDMHSVSRHGYQLEMGSDVDTETEGAASPDHALRMWIRGMKSEHSSCLSSRANSALSLTDTDHERKSDGENGFKFSPVCCDMEAQAGSTQDVQSSPHNQFTFRPLPPPPPPPHACTCARKPPPAADSLQRRSMTTRSQPSPAAPAPPTSTQDSVHLHNSWVLNSNIPLETRHSLFKHGSGSSAIFSAASQNYPLTSNTVYSPPPRPLPRSTFSRPAFTFNKPYRCCNWKCTALSATAITVTLALLLAYVIAVHLFGLTWQLQPVEGELYANGVSKGNRGTESMDTTYSPIGGKVSDKSEKKVFQKGRAIDTGEVDIGAQVMQTIPPGLFWRFQITIHHPIYLKFNISLAKDSLLGIYGRRNIPPTHTQFDFVKLMDGKQLVKQDSKGSDDTQHSPRNLILTSLQETGFIEYMDQGPWYLAFYNDGKKMEQVFVLTTAIEIMDDCSTNCNGNGECISGHCHCFPGFLGPDCARDSCPVLCGGNGEYEKGHCVCRHGWKGPECDVPEEQCIDPTCFGHGTCIMGVCICVPGYKGEICEEEDCLDPMCSNHGICVKGECHCSTGWGGVNCETPLPVCQEQCSGHGTFLLDAGVCSCDPKWTGSDCSTELCTMECGSHGVCSRGICQCEEGWVGPTCEERSCHSHCTEHGQCKDGKCECSPGWEGDHCTIAHYLDAVRDGCPGLCFGNGRCTLDQNGWHCVCQVGWSGTGCNVVMEMLCGDNLDNDGDGLTDCVDPDCCQQSNCYISPLCQGSPDPLDLIQQSQTLFSQHTSRLFYDRIKFLIGKDSTHVIPPEVSFDSRRACVIRGQVVAIDGTPLVGVNVSFLHHSDYGFTISRQDGSFDLVAIGGISVILIFDRSPFLPEKRTLWLPWNQFIVVEKVTMQRVVSDPPSCDISNFISPNPIVLPSPLTSFGGSCPERGTIVPELQVVQEEIPIPSSFVRLSYLSSRTPGYKTLLRILLTHSTIPVGMIKVHLTVAVEGRLTQKWFPAAINLVYTFAWNKTDIYGQKVWGLAEALVSVGYEYETCPDFILWEQRTVVLQGFEMDASNLGDWSLNKHHILNPQSGIIHKGNGENMFISQQPPVISTIMGNGHQRSVACTNCNGPAHNNKLFAPVALASGPDGSVYVGDFNFVRRIFPSGNSVSILELSTSPAHKYYLAMDPVSESLYLSDTNTRKVYKLKSLVETKDLSKNFEVVAGTGDQCLPFDQSHCGDGGRASEASLNSPRGITVDRHGFIYFVDGTMIRKIDENAVITTVIGSNGLTSTQPLSCDSGMDITQVRLEWPTDLAVNPMDNSLYVLDNNIVLQISENRRVRIIAGRPIHCQVPGIDHFLVSKVAIHSTLESARAISVSHSGLLFIAETDERKVNRIQQVTTNGEIYIIAGAPTDCDCKIDPNCDCFSGDGGYAKDAKMKAPSSLAVSPDGTLYVADLGNVRIRTISRNQAHLNDMNIYEIASPADQELYQFTVNGTHLHTLNLITRDYVYNFTYNSEGDLGAITSSNGNSVHIRRDAGGMPLWLVVPGGQVYWLTISSNGVLKRVSAQGYNPALMTYPGNTGLLATKSNENGWTTVYEYDPEGHLTNATFPTGEVSSFHSDLEKLTKVELDTSNRENVLMSTNLTATSTIYILKQENTQSTYRVNPDGSLRVTFASGMEIGLSSEPHILAGAVNPTLGKCNISLPGEHNANLIEWRQRKEQNKGNVSAFERRLRAHNRNLLSIDFDHITRTGKIYDDHRKFTLRILYDQTGRPILWSPVSRYNEVNITYSPSGLVTFIQRGTWNEKMEYDQSGKIISRTWADGKIWSYTYLEKSVMLLLHSQRRYIFEYDQSDCLLSVTMPSMVRHSLQTMLSVGYYRNIYTPPDSSTSFIQDYSRDGRLLQTLHLGTGRRVLYKYTKQARLSEVLYDTTQVTLTYEESSGVIKTIHLMHDGFICTIRYRQTGPLIGRQIFRFSEEGLVNARFDYSYNNFRVTSMQAVINETPLPIDLYRYVDVSGRTEQFGKFSVINYDLNQVITTTVMKHTKIFSANGQVIEVQYEILKAIAYWMTIQYDNVGRHGNMCIRVGVDANITRYFYEYDADGQLQTVSVNDKTQWRYSYDLNGDINLLSHGKSARLTPLRYDLRDRITRLGEIQYKMDEDGFLRQRGNDIFEYNSNGLLQKAYNKASGWTVQYYYDGLGRRVASKSSLGQHLQFFVDATANPIRVTHLYNHTSSEITSLYYDLQGHLIAMELSSGEEYYVACDNTGTPLAVFSSRGQVIKEILYTPYGDIYHDTYPDFQVIIGFHGGLYDFLTKLVHLGQRDYDVVAGRWTTAYHHIWKQLNLLPKPFNLYSFENNYPVGKIQDVAKYTTDIRSWLELFGFQLHNVLPGFPKPELENLELTYELLRLQTKTQEWDPGKTILGIQCELQKQLRNFISLDQLPMTPRYNDGRCLEGGKQPRFAAVPSVFGKGIKFAIKDGIVTADIIGVANEDSRRLAAILNNAHYLENLHFTIEGRDTHYFIKLGSLEEDLVLIGNTGGRRILENGVNVTVSQMTSLLNGRTRRFADIQLQHGALCFNIRYGTTVEEEKNHVLEIARQRAVAQAWTKEQRRLQEGEEGIRAWTEGEKQQLLSTGRVQGYDGYFVLSVEQYLELSDSANNIHFMRQSEIGRR

SEQ ID NO: 231 - DNA, 4930 bp, human organism
ctcagccttcccggttcgggaaaggggaagaatgcaggaggggtaggatttctttcctgataggatcggttgggaaagaccgcagcctgtgtgtgtctttcccttcgaccaaggtgtctgttgctccgtaaataaaacgtcccactgccttctgagagcgctataaaggcagcggaagggtagtccgcggggcattccgggcggggcgcgagcagagacaggtcatggcagcgccaggcggcaggtcggagccgccgcagctccccgagtacagctgcagctacatggtgtcgcggccggtctacagcgagctcgctttccagcaacagcacgagcggcgcctgcaggagcgcaagacgctgcgggagagcctggccaagtgctgcagttgttcaagaaagagagcctttggtgtgctaaagactcttgtgcccatcttggagtggctccccaaataccgagtcaaggaatggctgcttagtgacgtcatttcgggagttagtactgggctagtggccacgctgcaagggatggcatatgccctactagctgcagttcctgtcggatatggtctctactctgcttttttccctatcctgacatactttatctttggaacatcaagacatatctcagttggaccttttccagtggtgagtttaatggtgggatctgttgttctgagcatggcccccgacgaacactttctcgtatccagcagcaatggaactgtattaaatactactatgatagacactgcagctagagatacagctagagtcctgattgccagtgccctgactctgctggttggaattatacagttgatatttggtggcttgcagattggattcatagtgaggtacttggcagatcctttggttggtggcttcacaacagctgctgccttccaagtgctggtctcacagctaaagattgtcctcaatgtttcaaccaaaaactacaatggagttctctctattatctatacgctggttgagatttttcaaaatattggtgataccaatcttgctgatttcactgctggattgctcaccattgtcgtctgtatggcagttaaggaattaaatgatcggtttagacacaaaatcccagtccctattcctatagaagtaattgtgacgataattgctactgccatttcatatggagccaacctggaaaaaaattacaatgctggcattgttaaatccatcccaagggggtttttgcctcctgaacttccacctgtgagcttgttctcggagatgctggctgcatcattttccatcgctgtggtggcttatgctattgcagtgtcagtaggaaaagtatatgccaccaagtatgattacaccatcgatgggaaccaggaattcattgcctttgggatcagcaacatcttctcaggattcttctcttgttttgtggccaccactgctctttcccgcacggccgtccaggagagcactggaggaaagacacaggttgctggcatcatctctgctgcgattgtgatgatcgccattcttgccctggggaagcttctggaacccttgcagaagtcggtcttggcagctgttgtaattgccaacctgaaagggatgtttatgcagctgtgtgacattcctcgtctgtggagacagaataagattgatgctgttatctgggtgtttacgtgtatagtgtccatcattctggggctggatctcggtttactagctggccttatatttggactgttgactgtggtcctgagagttcagtttccttcttggaatggccttggaagcatccctagcacagatatctacaaaagtaccaagaattacaaaaacattgaagaacctcaaggagtgaagattcttagattttccagtcctattttctatggcaatgtcgatggttttaaaaaatgtatcaagtccacagttggatttgatgccattagagtatataataagaggctgaaagcgctgaggaaaatacagaaactaataaaaagtggacaattaagagcaacaaagaatggcatcataagtgatgctgtttcaacaaataatgcttttgagcctgatgaggatattgaagatctggaggaacttgatatcccaaccaaggaaatagagattcaagtggattggaactctgagcttccagtcaaagtgaacgttcccaaagtgccaatccatagccttgtgcttgactgtggagctatatctttcctggacgttgttggagtgagatcactgcgggtgattgtcaaagaattccaaagaattgatgtgaatgtgtattttgcatcacttcaagattatgtgatagaaaagctggagcaatgcgggttctttgacgacaacattagaaaggacacattctttttgacggtccatgatgctatactctatctacagaaccaagtgaaatctcaagagggtcaaggttccattttagaaacgatcactctcattcaggattgtaaagatacccttgaattaatagaaacagagctgacggaagaagaacttgatgtccaggatgaggctatgcgtacacttgcatcctgaaagtgggttcgggaggtctctatgagcaaggaatacaagacaaaacttcctcaatgcattgactatttcttcagactcaaaacactcattcttttttctattaagccattgaaagagaagcactaagactgcttctaggctttatttataaaataaacaccttatccctaacatgggcaaaatggctagaattattcagacgatttggcagcgtccagggtaagctggtgttataatacgctgctgatctacatcacagatttgctaataatgttcacgtgggccctggcatatctctgttcagttagagtgagtgctgacccaacagcctctgtggtcaagcgagtcacgaatgattaatcataaagaaaaatcagtttttgactgacctggatatccatgagctgcactgatcaccatgtaaggtcacatttagtaaatgctgaaataaaatgattaatgcatttatcaataaaagcctttgaaaatactttggataataaattggagttttaaaaatgcaaatttgcttagtatctaataatgaagtgttattacatatagccggaattgaggatctctttgatcctggaaatggtttacctaaaagctacagaaccaggccaatatattttgaaatattgatgcagacaaatgaaataataaagagattttcatggtttataaaaatcttttttgatatgataataatcatgatcacaactgagatcaaaaaaatatatgacagattattttgtttaaaaatgcagttttaattatcttagtctatagaaatgatcattgcatggaggcatgtataggtatgatctgtgtaaaatctgacataaaaacagtgctattctgagtgaaaatttttttgatgtgcttacataaccatggtgattaaaatgagtttatattttttctcaaaaattttagcagtgtgtaaagtaagtaatctttaactgaactctgaccacttaaaaaaaaatctaaaaattgaactacctatagtagtctgtgtttaaagtgaatttttaaagacaaagcattctaaatgaactcaatataaaaacattcatttggaatgtacatactgaaaaatacaggtttttttgaccaaaagtttttatatcttttctttttatttatttttttcctaagtgccaacaattttctagatattatatacaacacaggctttgatcttggggacttttcccatatatttcacactggagtgaatgaagttgtacttcatttctagagaaaagttatacccaggtccccaattgagaatgtcttgcttgattgaaaacgacatcatcccttggtatactccagggattggtttcaggacccctgcatttaccaaaatttgtgcacactcaagtcctgcagtcacccctgcctaaagatagaatggcttctctgtttttcttctgaaatacaaccagaaacaatgtgtctatttctgaaagaataggattaatgatcatacaaatgggttaatcctgaattctggttgtaaatctggttacagcataactaggattataatgctgcctcattttcacagcactacttgcttatattgacaacaaatcatctcgctaaagagtgaatgtaggccaggcgcggtggctcatgcctgtaatcccagcactttgggaggccgaggcgggtggatcacgaggtcaggagatcgagaccatcctggctaacatggtaaaaccccgtctctactaaaaatagaaaaaaagaaattagcctagcgtggtggctggcgggcgcctgtagtcccagctatttgggaggctaaggcaggagaatggcgtgaacccgggaggcggagcttgcagtgagccgaggtcgtgccactgcactccagcctgggcgacagagcaagactccgtctcaaaaaaaaaaaaaaaaaaaaaaaaagagtgaatgtaatagtcttgcagaaaatgaatgaatacctttgttcaataaaggaaatatgcactgctcacttttttgaaggaaatgccaaagttacgttttacaacaaggctagagtttgtaaattctgggttcatttgtgatgacataagtcagcaaactgcgggaatactgtctcttctatgtattttgtgaatagtaagcataattttagttttgtattatcaatgaaaatttcacttgaaattaaagctgccttttgttatatttttaacctataggataagattccagtattgtatatgagttttaacaaattaaaaaatcaaatcatgtacatttgaaaatatttgcacacatttaaaaataaatgtaaagttgtcttttaaactactcggatgtgtcctttctgaacaaaa

SEQ ID NO: 232 - protein, 790 aa, human organism
MAAPGGRSEPPQLPEYSCSYMVSRPVYSELAFQQQHERRLQERKTLRESLAKCCSCSRKRAFGVLKTLVPILEWLPKYRVKEWLLSDVISGVSTGLVATLQGMAYALLAAVPVGYGLYSAFFPILTYFIFGTSRHISVGPFPVVSLMVGSVVLSMAPDEHFLVSSSNGTVLNTTMIDTAARDTARVLIASALTLLVGIIQLIFGGLQIGFIVRYLADPLVGGFTTAAAFQVLVSQLKIVLNVSTKNYNGVLSIIYTLVEIFQNIGDTNLADFTAGLLTIVVCMAVKELNDRFRHKIPVPIPIEVIVTIIATAISYGANLEKNYNAGIVKSIPRGFLPPELPPVSLFSEMLAASFSIAVVAYAIAVSVGKVYATKYDYTIDGNQEFIAFGISNIFSGFFSCFVATTALSRTAVQESTGGKTQVAGIISAAIVMIAILALGKLLEPLQKSVLAAVVIANLKGMFMQLCDIPRLWRQNKIDAVIWVFTCIVSIILGLDLGLLAGLIFGLLTVVLRVQFPSWNGLGSIPSTDIYKSTKNYKNIEEPQGVKILRFSSPIFYGNVDGFKKCIKSTVGFDAIRVYNKRLKALRKIQKLIKSGQLRATKNGIISDAVSTNNAFEPDEDIEDLEELDIPTKEIEIQVDWNSELPVKVNVPKVPIHSLVLDCGAISFLDVVGVRSLRVIVKEFQRIDVNVYFASLQDYVIEKLEQCGFFDDNIRKDTFFLTVHDAILYLQNQVKSQEGQGSILETITLIQDCKDTLELIETELTEEELDVQDEAMRTLASQDEAMRTLAS

SEQ ID NO: 233 - DNA, 1282 bp, human organism; identical to SEQ ID NO: 139

SEQ ID NO: 234 - protein, 339 aa, human organism; identical to SEQ ID NO: 32

SEQ ID NO: 235 - DNA, 1833 bp, human organism
atgattgcttcacagtttctctcagctctcactttggtgcttctcattaaagagagtggagcctggtcttacaacacctccacggaagctatgacttatgatgaggccagtgcttattgtcagcaaaggtacacacacctggttgcaattcaaaacaaagaagagattgagtacctaaactccatattgagctattcaccaagttattactggattggaatcagaaaagtcaacaatgtgtgggtctgggtaggaacccagaaacctctgacagaagaagccaagaactgggctccaggtgaacccaacaataggcaaaaagatgaggactgcgtggagatctacatcaagagagaaaaagatgtgggcatgtggaatgatgagaggtgcagcaagaagaagcttgccctatgctacacagctgcctgtaccaatacatcctgcagtggccacggtgaatgtgtagagaccatcaataattacacttgcaagtgtgaccctggcttcagtggactcaagtgtgagcaaattgtgaactgtacagccctggaatcccctgagcatggaagcctggtttgcagtcacccactgggaaacttcagctacaattcttcctgctctatcagctgtgataggggttacctgccaagcagcatggagaccatgcagtgtatgtcctctggagaatggagtgctcctattccagcctgcaatgtggttgagtgtgatgctgtgacaaatccagccaatgggttcgtggaatgtttccaaaaccctggaagcttcccatggaacacaacctgtacatttgactgtgaagaaggatttgaactaatgggagcccagagccttcagtgtacctcatctgggaattgggacaacgagaagccaacgtgtaaagctgtgacatgcagggccgtccgccagcctcagaatggctctgtgaggtgcagccattcccctgctggagagttcaccttcaaatcatcctgcaacttcacctgtgaggaaggcttcatgttgcagggaccagcccaggttgaatgcaccactcaagggcagtggacacagcaaatcccagtttgtgaagctttccagtgcacagccttgtccaaccccgagcgaggctacatgaattgtcttcctagtgcttctggcagtttccgttatgggtccagctgtgagttctcctgtgagcagggttttgtgttgaagggatccaaaaggctccaatgtggccccacaggggagtgggacaacgagaagcccacatgtgaagctgtgagatgcgatgctgtccaccagcccccgaagggtttggtgaggtgtgctcattcccctattggagaattcacctacaagtcctcttgtgccttcagctgtgaggagggatttgaattatatggatcaactcaacttgagtgcacatctcagggacaatggacagaagaggttccttcctgccaagtggtaaaatgttcaagcctggcagttccgggaaagatcaacatgagctgcagtggggagcccgtgtttggcactgtgtgcaagttcgcctgtcctgaaggatggacgctcaatggctctgcagctcggacatgtggagccacaggacactggtctggcctgctacctacctgtgaagctcccactgagtccaacattcccttggtagctggactttctgctgctggactctccctcctgacattagcaccatttctcctctggcttcggaaatgcttacggaaagcaaagaaatttgttcctgccagcagctgccaaagccttgaatcagacggaagctaccaaaagccttcttacatcctttaa

SEQ ID NO: 236 - protein, 610 aa, human organism
MIASQFLSALTLVLLIKESGAWSYNTSTEAMTYDEASAYCQQRYTHLVAIQNKEEIEYLNSILSYSPSYYWIGIRKVNNVWVWVGTQKPLTEEAKNWAPGEPNNRQKDEDCVEIYIKREKDVGMWNDERCSKKKLALCYTAACTNTSCSGHGECVETINNYTCKCDPGFSGLKCEQIVNCTALESPEHGSLVCSHPLGNFSYNSSCSISCDRGYLPSSMETMQCMSSGEWSAPIPACNVVECDAVTNPANGFVECFQNPGSFPWNTTCTFDCEEGFELMGAQSLQCTSSGNWDNEKPTCKAVTCRAVRQPQNGSVRCSHSPAGEFTFKSSCNFTCEEGFMLQGPAQVECTTQGQWTQQIPVCEAFQCTALSNPERGYMNCLPSASGSFRYGSSCEFSCEQGFVLKGSKRLQCGPTGEWDNEKPTCEAVRCDAVHQPPKGLVRCAHSPIGEFTYKSSCAFSCEEGFELYGSTQLECTSQGQWTEEVPSCQVVKCSSLAVPGKINMSCSGEPVFGTVCKFACPEGWTLNGSAARTCGATGHWSGLLPTCEAPTESNIPLVAGLSAAGLSLLTLAPFLLWLRKCLRKAKKFVPASSCQSLESDGSYQKPSYIL

SEQ ID NO: 237 - DNA, 3793 bp, human organism
atgatgtgtgaagtgatgcccacgattaatgaggacaccccaatgagccaaagggggtcccaaagcagtggctcggactcagactcccattttgagcagctgatggtgaatatgctagatgaaagggatcgtcttctagacacccttcgggagacccaggaaagcctctcacttgcccagcaaagacttcaggatgtcatctatgaccgagactcactccagagacagctcaattcagccctgccacaggatatcgaatccctaacaggagggctggctggttctaagggggctgatccaccggaatttgctgcactgacaaaagaattaaatgcctgcagggaacaacttctagaaaaggaagaagaaatctctgaacttaaagctgaaagaaacaacacaagactattactggagcatttggagtgccttgtgtcacgacatgaaagatcactaagaatgacggtggtaaaacggcaagcccagtctccctcaggagtatccagtgaagttgaagttctcaaggcactgaaatctttgtttgagcaccacaaggccttggatgaaaaggtaagggagcgactgagggtttctttagaaagagtctctgcactggaagaagaactagctgctgctaatcaggagattgttgccttgcgtgaacaaaatgttcatatacaaagaaaaatggcatcaagcgagggatccacagagtcagaacatcttgaagggatggaacctggacagaaagtccatgagaagcgtttgtccaatggttctatagactcaaccgatgaaactagtcaaatagttgaactacaagaattgcttgaaaagcaaaactatgaaatggcccagatgaaagaacgtttagcagccctttcttcccgagtgggagaggtggaacaggaagcagagacagcaagaaaggatctcattaaaacagaagaaatgaacaccaagtatcaaagggacattagggaggccatggcacaaaaggaagatatggaagaaagaattacaacccttgaaaagcgttacctcagtgctcagagagaatctacctccatacatgacatgaatgataaactagaaaatgagttagcaaataaagaagctatcctacggcagatggaagagaaaaacagacagttacaagaacgtcttgagctagctgaacaaaagttgcagcagaccatgagaaaggctgaaaccttgcctgaagtagaggctgaactggctcagagaattgcagccctaaccaaggctgaagagagacatggaaatattgaagaacgtatgagacatttagagggtcaacttgaagagaagaatcaagaacttcaaagagctaggcaaagagagaaaatgaatgaggagcataacaagagattatcggatacggttgatagacttctgactgaatccaatgaacgcctacaactacacttaaaggaaagaatggctgctctagaagaaaagaatgttttaattcaagaatcagaaactttcagaaagaatcttgaagaatctttacatgataaggaaagattagcagaagaaattgaaaagctgagatctgaacttgaccaattgaaaatgagaactggctctttaattgaacccacaataccaagaactcatctagacacctcagctgagttgcggtactcagtgggatccctagtggacagccagtctgattacagaacaactaaagtaataagaagaccaaggagaggccgcatgggtgtgcgaagagatgagccaaaggtgaaatctcttggggatcacgagtggaatagaactcaacagattggagtactaagcagccacccttttgaaagtgacactgaaatgtctgatattgatgatgatgacagagaaacaatttttagctcaatggatcttctctctccaagtggtcattccgatgcccagacgctagccatgatgcttcaggaacaattggatgccatcaacaaagaaatcaggctaattcaggaagaaaaagaatctacagagttgcgtgctgaagaaattgaaaatagagtggctagtgtgagcctcgaaggcctgaatttggcaagggtccacccaggtacctccattactgcctctgttacagcttcatcgctggccagttcatctccccccagtggacactcaactccaaagctcacccctcgaagccctgccagggaaatggatcggatgggagtcatgacactgccaagtgatctgaggaaacatcggagaaagattgcagttgtggaagaagatggtcgagaggacaaagcaacaattaaatgtgaaacttctcctcctcctacccctagagccctcagaatgactcacactctcccttcttcctaccacaatgatgctcgaagtagtttatctgtctctcttgagccagaaagcctcgggcttggtagtgccaacagcagccaagactctcttcacaaagcccccaagaagaaaggaatcaagtcttcaataggacgtttgtttggtaaaaaagaaaaagctcgacttgggcagctccgaggctttatggagactgaagctgcagctcaggagtccctggggttaggcaaactcggaactcaagctgagaaggatcgaagactaaagaaaaagcatgaacttcttgaagaagctcggagaaagggattaccttttgcccagtgggatgggccaactgtggtcgcatggctagagctttggttgggaatgcctgcgtggtacgtggcagcctgccgagccaacgtgaagagtggtgccatcatgtctgctttatctgacactgagatccagagagaaattggaatcagcaatccactgcatcgcttaaaacttcgattagcaatccaggagatggtttccctaacaagtccttcagctcctccaacatctcgaactccttcaggcaacgtttgggtgactcatgaagaaatggaaaatcttgcagctccagcaaaaacgaaagaatctgaggaaggaagctgggcccagtgtccggtttttctacagaccctggcttatggagatatgaatcatgagtggattggaaatgaatggcttcccagcttggggttacctcagtacagaagttactttatggaatgcttggtagatgcaagaatgttagatcacctaacaaaaaaagatctccgtgtccatttaaaaatggtggatagtttccatcgaacaagtttacaatatggaattatgtgcttaaagaggttgaattatgacagaaaagaactagaaagaagacgggaagcaagccaacatgaaataaaagacgtgttggtgtggagcaatgaccgaattattcgctggatacaagcaattggacttcgagaatatgcaaataatatacttgagagcggtgtgcatggctcacttatagccctggatgaaaactttgactacagcagcttaactttattattacagattccaacacagaacacccaggcaaggcagattcttgaaagagaatacaataacctcttggccctgggaactgaaaggcgactggatgaaagtgatgacaagaacttcagacgtggatcaacctggagaaggcagtttcctcctcgtgaagtacatggaatcagcatgatgcctgggtcctcagaaacattaccagctggatttaggttaaccacaacctctgggcaatcaagaaaaatgacaacagatgttgcttcatcaagactgcagaggttagacaactccactgttcgcacatactcatgtctcgagtaagcggccgctttaa

SEQ ID NO: 238 - protein, 1259 aa, human organism
MMCEVMPTINEDTPMSQRGSQSSGSDSDSHFEQLMVNMLDERDRLLDTLRETQESLSLAQQRLQDVIYDRDSLQRQLNSALPQDIESLTGGLAGSKGADPPEFAALTKELNACREQLLEKEEEISELKAERNNTRLLLEHLECLVSRHERSLRMTVVKRQAQSPSGVSSEVEVLKALKSLFEHHKALDEKVRERLRVSLERVSALEEELAAANQEIVALREQNVHIQRKMASSEGSTESEHLEGMEPGQKVHEKRLSNGSIDSTDETSQIVELQELLEKQNYEMAQMKERLAALSSRVGEVEQEAETARKDLIKTEEMNTKYQRDIREAMAQKEDMEERITTLEKRYLSAQRESTSIHDMNDKLENELANKEAILRQMEEKNRQLQERLELAEQKLQQTMRKAETLPEVEAELAQRIAALTKAEERHGNIEERMRHLEGQLEEKNQELQRARQREKMNEEHNKRLSDTVDRLLTESNERLQLHLKERMAALEEKNVLIQESETFRKNLEESLHDKERLAEEIEKLRSELDQLKMRTGSLIEPTIPRTHLDTSAELRYSVGSLVDSQSDYRTTKVIRRPRRGRMGVRRDEPKVKSLGDHEWNRTQQIGVLSSHPFESDTEMSDIDDDDRETIFSSMDLLSPSGHSDAQTLAMMLQEQLDAINKEIRLIQEEKESTELRAEEIENRVASVSLEGLNLARVHPGTSITASVTASSLASSSPPSGHSTPKLTPRSPAREMDRMGVMTLPSDLRKHRRKIAVVEEDGREDKATIKCETSPPPTPRALRMTHTLPSSYHNDARSSLSVSLEPESLGLGSANSSQDSLHKAPKKKGIKSSIGRLFGKKEKARLGQLRGFMETEAAAQESLGLGKLGTQAEKDRRLKKKHELLEEARRKGLPFAQWDGPTVVAWLELWLGMPAWYVAACRANVKSGAIMSALSDTEIQREIGISNPLHRLKLRLAIQEMVSLTSPSAPPTSRTPSGNVWVTHEEMENLAAPAKTKESEEGSWAQCPVFLQTLAYGDMNHEWIGNEWLPSLGLPQYRSYFMECLVDARMLDHLTKKDLRVHLKMVDSFHRTSLQYGIMCLKRLNYDRKELERRREASQHEIKDVLVWSNDRIIRWIQAIGLREYANNILESGVHGSLIALDENFDYSSLTLLLQIPTQNTQARQILEREYNNLLALGTERRLDESDDKNFRRGSTWRRQFPPREVHGISMMPGSSETLPAGFRLTTTSGQSRKMTTDVASSRLQRLDNSTVRTYSCLE

SEQ ID NO: 239 - DNA, 1134 bp, human organism; identical to SEQ ID NO: 221

SEQ ID NO: 240 - protein, 377 aa, human organism; identical to SEQ ID NO: 222

SEQ ID NO: 241 - DNA, 4298 bp, human organism
aattcgcccttgcttaattaagcatgtttaccttcctgtcatctgtcactgctgctgtcagtggcctcctggtgggttatgaacttgggatcatctctggggctcttcttcagatcaaaaccttattagccctgagctgccatgagcaggaaatggttgtgagctccctcgtcattggagccctccttgcctcactcaccggaggggtcctgatagacagatatggaagaaggacagcaatcatcttgtcatcctgcctgcttggactcggaagcttagtcttgatcctcagtttatcctacacggttcttatagtgggacgcattgccataggggtttccatctccctctcttccattgccacttgtgtttacatcgcagagattgctcctcaacacagaagaggccttcttgtgtcactgaatgagctgatgattgtcatcggcattctttctgcctatatttcaaattacgcatttgccaatgttttccatggctggaagtacatgtttggtcttgtgattcccttgggagttttgcaagcaattgcaatgtattttcttcctccaagccctcggtttctggtgatgaaaggacaagagggagctgctagcaaggttcttggaaggttaagagcactctcagatacaactgaggaactcactgtgatcaaatcctccctgaaagatgaatatcagtacagtttttgggatctgtttcgttcaaaagacaacatgcggacccgaataatgataggactaacactagtattttttgtacaaatcactggccaaccaaacatattgttctatgcatcaactgttttgaagtcagttggatttcaaagcaatgaggcagctagcctcgcctccactggggttggagtcgtcaaggtcattagcaccatccctgccactcttcttgtagaccatgtcggcagcaaaacattcctctgcattggctcctctgtgatggcagcttcgttggtgaccatgggcatcgtaaatctcaacatccacatgaacttcacccatatctgcagaagccacaattctatcaaccagtccttggatgagtctgtgatttatggaccaggaaacctgtcaaccaacaacaatactctcagagaccacttcaaagggatttcttcccatagcagaagctcactcatgcccctgagaaatgatgtggataagagaggggagacgacctcagcatccttgctaaatgctggattaagccacactgaataccagatagtcacagaccctggggacgtcccagcttttttgaaatggctgtccttagccagcttgcttgtttatgttgctgctttttcaattggtctaggaccaatgccctggctggtgctcagcgagatctttcctggtgggatcagaggacgagccatggctttaacttctagcatgaactggggcatcaatctcctcatctcgctgacatttttgactgtaactgatcttattggcctgccatgggtgtgctttatatatacaatcatgagtctagatcttattggcctgccatgggtgtgctttatatatacaatcatgagtctagcatccctgctttttgttgttatgtttatacctgagacaaagggatgctctttggaacaaatatcaatggagctagcaaaagtgaactatgtgaaaaacaacatttgttttatgagtcatcaccaagaagaattagtgccaaaacagcctcaaaaaagaaaaccccaggagcagctcttggagtgtaacaagctgtgtggtaggggccaatccaggcagctttctccagagacctaatggcctcaacaccttctgaacgtggatagtgccagaacacttaggagggtgtctttggaccaatgcatagttgcgactcctgtgctctcttttcagtgtcatggaactggttttgaagagacactctgaaatgataaagacagcctttaatccccctcctcmccagaaggaacctcaaaaggtagatgaggtacaaggtcctaagtgatctctttttctgagcaggatatcaggttaaaaaaaaaaagttactggctggtttaatactttctaccttcttcacagagcagcctttgaatagactatgtcctagtgaagacatcaacctccgccttaagctatgtatgtatggaggccagtcgcagctttattatgcagacacacaagtggtctggacatgagggtacagtttctgcctaccaagacactacttgcactggatcttacgcaaaaaagaaccagaacacacagtgtggacaactgcccatatattctatctagattaggagagggtcctggctaggattttagtggtaattcctagttacattcaacaagtataaagattatagagcttattttatgaactataaactataatttaatgcaaaatatccttttatgaatttcatgttaatattgtgaaatattaaaataattccrcaatagttgagaaaaatgagcatttttttccatttttaaaaaatgcatagaaaagacaattttaaaatcctgggaccatatttatttagaagtagctgttagtaaaacattagaaaaggagtcaggccattaggttatttatccaaatctctaagcaattaggttgaagttattaagtcaagcctagaaaagctgcctccttgtaaggctttcatgacaatgtatagtaatccacagtgtccaattcttcacactcctcaggaatatcactacctcaggttacggtacacaggctataattgatgatgatgttcagataactgaagacacaataaatgacattcagacatcaggamaawwccctcatgttcttttctatgatggccacctgtaccagcaacgtgggtttcacccacacaacgatgaactgttctcttacttctccagttgattttaaagacttgttaagaggtcttactaataaaatttgggtatgatagaaaawccacaatcaaawcttgaaccaaataacatattaaattactaatatttaagtgatggaagacacacaaaaaacttaaaagcacgaacaacctaacttgaaaaagaattttaaaatatgattaacctgaagaaaagagaatcctaagagccaaagctcctttttatttagcttggaattttcctattggttcctaacaaactgtcccaatgtcatataaggaaacatgatctattacattcctttataacaatgtggagagactataaacctatgtaagtagtaaaactatatyagagactcaggagactgactaaaaggcctggatctgcagtgtattatctgtataaaaattggcagggggaagctaaaaggaaaggagattggagatctcaattctatcatggtgtatttcatacgcaaatcagagcatgcattgttttttgtttttggaaagagaagggaagtgtgttctgccccatgtttccttccgtgtttatagttcaaactctatatatacttcaggtattttttgtttagcccttcattataaatgggcaggaaattgtttatcaacctagccagtttattactagtgaccttgacttcagtatcttgagcattcttttatatttttcttttattatcctgagtctgtaactaaacaattttgtcttcaaatttttatccaatatccattgcaccacaccaaatcaagcttcttgattttcaaaaataaaaagggggaaatacttacaacttgtacatatatattcacagtttttatttataaaaaaaatttacagtacttatggagagccagcagaagacatcagagcactcacttcttcccatctttgttaaggttagcgaattacccatggacactgttaggtgaggctcattcggcagccctgaaaacaaacctggtcacactgtctttaccctctcccttcagataaagcacttcgattatctattgatctgcccagttttcaagtcatgcgaatactaaaaaggttacatcatctggatctgtaccttggctatataagcatgttttccccctattctatgtttctttttttggtgaacattgaaaaacaggaggtgacttattactgttaattaaaactaaatgaaaaatgtcaagtctttaaaacagtgagcttgtaactctttcatgtaattttattctctatgaatttggctatcctactgaatcttaaaataaaggaaataaacacttttttttwaaaaaaaaggaaaaatamaarwmwaaaaatctcaatgaaatatttcacaagaaggaaaaa

SEQ ID NO: 242 - protein, 597 aa, human organism
MFTFLSSVTAAVSGLLVGYELGIISGALLQIKTLLALSCHEQEMVVSSLVIGALLASLTGGVLIDRYGRRTAIILSSCLLGLGSLVLILSLSYTVLIVGRIAIGVSISLSSIATCVYIAEIAPQHRRGLLVSLNELMIVIGILSAYISNYAFANVFHGWKYMFGLVIPLGVLQAIAMYFLPPSPRFLVMKGQEGAASKVLGRLRALSDTTEELTVIKSSLKDEYQYSFWDLFRSKDNMRTRIMIGLTLVFFVQITGQPNILFYASTVLKSVGFQSNEAASLASTGVGVVKVISTIPATLLVDHVGSKTFLCIGSSVMAASLVTMGIVNLNIHMNFTHICRSHNSINQSLDESVIYGPGNLSTNNNTLRDHFKGISSHSRSSLMPLRNDVDKRGETTSASLLNAGLSHTEYQIVTDPGDVPAFLKWLSLASLLVYVAAFSIGLGPMPWLVLSEIFPGGIRGRAMALTSSMNWGINLLISLTFLTVTDLIGLPWVCFIYTIMSLDLIGLPWVCFIYTIMSLASLLFVVMFIPETKGCSLEQISMELAKVNYVKNNICFMSHHQEELVPKQPQKRKPQEQLLECNKLCGRGQSRQLSPET

SEQ ID NO: 243 - DNA, 979 bp, human organism
  misc_feature (17)..(17): n is a, c, g, or t
  misc_feature (229)..(230): n is a, c, g, or t
  misc_feature (238)..(238): n is a, c, g, or t
tttagccaccagagganttctcttgaaatacccaaaatccatcagtatcttgaatcatgctggattttgaagaattcttaagaagccatgtaaagggggctctctggccttgaaatagtgatgttttttatacagaaaggagaatgcagaatggtcagactatcatgcactgttaaatttgatttcaagaaattacaggaaaactttccaaagttccatctcacagaannttattttnccaagaattccaagataagtttagttttatggaagacttttatgtggtttttactcactcttcatctcagacatcgacagatgattacatcacttatagttctagtaaatttattaatataaaactcagagacattccaatatccacattgcttacaccattaggcatagattcagtgtcagctatgacaattgaaaatgagctgttttgtgatttaaaggtttaaatttctctaaccaaactgcttgatccagatgcaggactgcaaatgttaatatttgttctggaagaacaatcaaataagacttaagaggaaagggaatggccacaatccacctgaaattttttcttaaaaagtgtgcagcctactaaatcagaatgaaaatagaagtacaagattataaacaaaatgcaatcaaacttttcttaagcttacctaaagttatttcatctgaaaatttcaagcaactttgttcaacattaaattgacaatctaaactaacaagtcttttgaatttatgcatggtagtaaacattctctctattaactttattacctaaggctaaacctaaaatttttaagcaaaattagaaaaatagtcttcactcatcaaaaaataaagtttgttacatttagtattttcccaataaaattggtcgttcttggttttttatttggagagtctgtgcaaaatgtcactaaaaataaattagcactagaaattatttctaaataccaaa

SEQ ID NO: 244 - DNA, 2443 bp, human organism
aaatggcgtgcccgtctctccgccggccccctgcctcgcagtggtttctcctgcagctcccctgggctccgcggccagtagtgcagcccgtggagccgcggctttgcccgtctcctctgggtggccccagtgcgcgggctgacactcattcagccggggaaggtgaggcgagtagaggctggtgcggaacttgccgcccccagcagcgccggcgggctaagcccagggccgggcagacaaaagaggccgcccgcgtaggaaggcacggccggcggcggcggagcgcagcgatggccgggcgagggggcagcgcgctgctggctctgtgcggggcactggctgcctgcgggtggctcctgggcgccgaagcccaggagcccggggcgcccgcggcgggcatgaggcggcgccggcggctgcagcaagaggacggcatctccttcgagtaccaccgctaccccgagctgcgcgaggcgctcgtgtccgtgtggctgcagtgcaccgccatcagcaggatttacacggtggggcgcagcttcgagggccgggagctcctggtcatcgagctgtccgacaaccctggcgtccatgagcctggtgagcctgaatttaaatacattgggaatatgcatgggaatgaggctgttggacgagaactgctcattttcttggcccagtacctatgcaacgaataccagaaggggaacgagacaattgtcaacctgatccacagtacccgcattcacatcatgccttccctgaacccagatggctttgagaaggcagcgtctcagcctggtgaactcaaggactggtttgtgggtcgaagcaatgcccagggaatagatctgaaccggaactttccagacctggataggatagtgtacgtgaatgagaaagaaggtggtccaaataatcatctgttgaaaaatatgaagaaaattgtggatcaaaacacaaagcttgctcctgagaccaaggctgtcattcattggattatggatattccttttgtgctttctgccaatctccatggaggagaccttgtggccaattatccatatgatgagacgcggagtggtagtgctcacgaatacagctcctccccagatgacgccattttccaaagcttggcccgggcatactcttctttcaacccggccatgtctgaccccaatcggccaccatgtcgcaagaatgatgatgacagcagctttgtagatggaaccaccaacggtggtgcttggtacagcgtacctggagggatgcaagacttcaattaccttagcagcaactgttttgagatcaccgtggagcttagctgtgagaagttcccacctgaagagactctgaagacctactgggaggataacaaaaactccctcattagctaccttgagcagatacaccgaggagttaaaggatttgtccgagaccttcaaggtaacccaattgcgaatgccaccatctccgtggaaggaatagaccacgatgttacatccgcaaaggatggtgattactggagattgcttatacctggaaactataaacttacagcctcagctccaggctatctggcaataacaaagaaagtggcagttccttacagccctgctgctggggttgattttgaactggagtcattttctgaaaggaaagaagaggagaaggaagaattgatggaatggtggaaaatgatgtcagaaactttaaatttttaaaaaggcttctagttagctgctttaaatctatctatataatgtagtatgatgtaatgtggtcttttttttagattttgtgcagttaatacttaacattgatttattttttaatcatttaaatattaatcaactttccttaaaataaatagcctcttaggtaaaaatataagaacttgatatatttcattctcttatatagtattcattttcctacctatattacacaaaaaagtatagaaaagatttaagtaattttgccatcctaggcttaaatgcaatattcctggtattatttacaatgcagaattttttgagtaattctagctttcaaaaattagtgaagttcttttactgtaattggtgacaatgtcacataatgaatgctattgaaaaggttaacagatacagctcggagttgtgagcactctactgcaagacttaaatagttcagtataaattgtcgtttttttcttgtgctgactaactataagcatgatcttgttaatgcatttttgatgggaagaaaaggtacatgtttacaaagaggttttatgaaaagaataaaaattgacttcttgcttgtacatataggagcaatactattatattatgtagtccgttaacactacttaaaagtttagggttttctcttggttgtagagtggcccagaattgcattctgaatgaataaaggttaaaaaaaaatccccagtgaaaaaaaa

SEQ ID NO: 245 - protein, 476 aa, human organism
MAGRGGSALLALCGALAACGWLLGAEAQEPGAPAAGMRRRRRLQQEDGISFEYHRYPELREALVSVWLQCTAISRIYTVGRSFEGRELLVIELSDNPGVHEPGEPEFKYIGNMHGNEAVGRELLIFLAQYLCNEYQKGNETIVNLIHSTRIHIMPSLNPDGFEKAASQPGELKDWFVGRSNAQGIDLNRNFPDLDRIVYVNEKEGGPNNHLLKNMKKIVDQNTKLAPETKAVIHWIMDIPFVLSANLHGGDLVANYPYDETRSGSAHEYSSSPDDAIFQSLARAYSSFNPAMSDPNRPPCRKNDDDSSFVDGTTNGGAWYSVPGGMQDFNYLSSNCFEITVELSCEKFPPEETLKTYWEDNKNSLISYLEQIHRGVKGFVRDLQGNPIANATISVEGIDHDVTSAKDGDYWRLLIPGNYKLTASAPGYLAITKKVAVPYSPAAGVDFELESFSERKEEEKEELMEWWKMMSETLNF

SEQ ID NO: 246 - DNA, 1926 bp, human organism
ggggcgacgtgagcgcgcaggggggcggcggcctcgcctcgtctctctctctgcgcctgggtcgggtgggtgacgccgagagccagagagatgtcggatttcgacagtaacccgtttgccgacccggatctcaacaatcccttcaaggatccatcagttacacaagtgacaagaaatgttccaccaggacttgatgaatataatccattctcggattctagaacacctccaccaggcggtgtgaagatgcctaatgtacccaatacacaaccagcaataatgaaaccaacagaggaacatccagcttatacacagattgcaaaggaacatgcattggcccaagctgaacttcttaagcgccaagaagaactagaaagaaaagccgcagaattagatcgtcgggaacgagaaatgcaaaacctcagtcaacatggtagaaaaaatatttggccacctcttcctagcaattttcctgtcggaccttgtttctatcaggaattttctgtagacattcctgtagaattccaaaagacagtaaagcttatgtactacttgtggatgttccatgcagtaacactgtttctaaatatcttcggatgcttggcttggttttgtgttgattctgcaagagcggttgattttggattgagtatcctgtggttcttgctttttactccttgttcatttgtctgttggtacagaccactttatggagctttcaggagtgacagttcatttagattctttgtattcttcttcgtctatatttgtcagtttgctgtacatgtactccaagctgcaggatttcataactggggcaattgtggttggatttcatcccttactggtctcaaccaaaatattcctgttggaatcatgatgataatcatagcagcacttttcacagcatcagcagtcatctcactagttatgttcaaaaaagtacatggactatatcgcacaacaggtgctagttttgagaaggcccaacaggagtttgcaacaggtgtgatgtccaacaaaactgtccagaccgcagctgcaaatgcagcttcaactgcagcatctagtgcagctcagaatgctttcaagggtaaccagatttaagaatcttcaaacaatacactgttaccttttgactgtacctttttctccagttactgtattctacaaatatttttatgttcaaaacacacagtacagacagcatggatatttcctgttcacttgtgcatgggctaaaaccaggaaaacttccttgtcttattactttacctaatagtttcttaatatttcagtgccccttgcagaaaaaatattacatgctaaataaatattctccatatttttgggggatgacattcagtgaattatttcagtggtgacccactgaaaattaataatggtacttatgattaaaaacgcatttaatactaactgcagtagttctttcaagaatctttagagataaggattgcacattggaaaagtaaaccatgtttcattcctttttccctatttatattgaaagaaataggccagcagagacttagggattttaaattggcttgctttttagctgtttcagtcaccagtgaagagcctatgtgcattttgtagtagataatgtaaaatttgtcatctttttcttttcttttttttagaatagctgatattttgataacaatctctaatttgcatgggcaccacatttcttatattaaaagaattagtgttttggcttctgtactgcttatggttgtaggattcaggggttaatggaatcacagaaatgatattctgcaagaatttcttttaaataaaaagtttgggggtgcaatataagaagtttatataatatgcagtacattatccaaaagagaaggtagttaatgcagtagaaagtagtggtaataattccttttt

SEQ ID NO: 247 - protein, 338 aa, human organism [sequence omitted]

SEQ ID NO: 248 - DNA, 615 bp, human organism
atgagagacaataaatcgtgtgcttttttcatgggaaagttaaatgtttgttttgaaggcacagtaatagcaggctattcagtgtttgccactacctgcatcattcatctggctgtagctagtgcactacaatttcctaaaaagtcttctcaccctcacaggactgctctacatctggcctctgccaatggaaattcagaagtagtaaaactcctgctggacagacgatgtcaacttaatatccttgacaacaaaaagaggacagctctgacaaaggccgtacaatgccaggaagatgaatgtgcgttaatgttgctggaacatggcactgatccgaatattccagatgagtatggaaataccgctctacactatgctatctacaatgaagataaattaatggccaaagcactgctcttatacggtgctgatatcgaatcaaaaaacaagcatggcctcacaccactgttacttggtgtacatgagcaaaaacagcaagtggtgaaatttttaatcaagaaaaaagcaaatttaaatgcactggatagatatggaaggtgtgtgaccttgggaacgttatttaccaccaaatatgttgtcatatatgaaaagtag

SEQ ID NO: 249 - protein, 204 aa, human organism
MRDNKSCAFFMGKLNVCFEGTVIAGYSVFATTCIIHLAVASALQFPKKSSHPHRTALHLASANGNSEVVKLLLDRRCQLNILDNKKRTALTKAVQCQEDECALMLLEHGTDPNIPDEYGNTALHYAIYNEDKLMAKALLLYGADIESKNKHGLTPLLLGVHEQKQQVVKFLIKKKANLNALDRYGRCVTLGTLFTTKYVVIYEK

SEQ ID NO: 250 - DNA, 3342 bp, human organism
atggtgatcatctatctttctttctgcaattattacatggagttctacagagaagagcttccccacattgactatttgattgacattcagtttgcaacaggaaaggttactcagccgggagaggacacttcctaccatcaatgcgctcagcttgaagccagagacgaaggcaccgacagtttattattaaacaatggcagcagcgccacgctgaagacacgaacgcgctgttatggaacccccagaggtctcccccatcgtagcctgctccagccgactccgcccacatgtaaaacgaagatcaggagcagatttgaagaattacaaagtgaattggtgccagtcagcatgtcagagacagaccacatagcctctacttcctctgataaaaatgttgggaaaacacctgaattaaaggaagactcatgcaacttgttttctggcaatgaaagcagcaaattagaaaatgagtccaaactattgtcattaaacactgataaaactttatgtcaacctaatgagcataataatcgaattgaagcccaggaaaattatattccagatcatggtggaggtgaggattcttgtgccaaaacagacacaggctcagaaaattctgaacaaatagctaattttcctagtggaaattttgctaaacatatttcaaaaacaaatgaaacagaacagaaagtaacacaaatattggtggaattaaggtcatctacatttccagaatcagctaatgaaaagacttattcagaaagcccctatgatacagactgcaccaagaaatttatttcaaaaataaagagcgtttcagcatcagaggatttgttggaagaaatagaatctgagctcttatctacggagtttgcagaacatcgagtaccaaatggaatgaataagggagaacatgcattagttctgtttgaaaagtgtgtgcaagataaatatttgcagcaggaacatatcataaaaaagttaattaaagaaaataagaagcatcaggagctcttcgtagacatttgttcagaaaaagacaatttaagagaagaactaaagaaaagaacagaaactgagaagcagcatatgaacacaattaaacagttagaatcaagaatagaagaacttaataaagaagttaaagcttccagagatcaactaatagctcaagacgttacagctaaaaatgcagttcagcagttacacaaagagatggcccaacggatggaacaggccaacaagaaatgtgaagaggcacgccaagaaaaagaagcaatggtaatgaaatatgtaagaggtgagaaggaatctttagatcttcgaaaggaaaaagagacacttgagaaaaaacttagagatgcaaataaggaacttgagaaaaacactaacaaaattaagcagctttctcaggagaaaggacggttgcaccagctgtatgaaactaaggaaggcgaaacgactagactcatcagagaaatagacaaattaaaggaagacattaactctcacgtcatcaaagtaaagtgggcacaaaacaaattaaaagctgaaatggattcacacaaggaaaccaaagataaactcaaagaaacaacaacaaaattaacacaagcaaaggaagaagcagatcagatacgaaaaaactgtcaggatatgataaaaacatatcaggagtcagaagaaattaaatcaaatgagcttgatgcaaagcttagagtcacaaaaggagaacttgaaaaacaaatgcaagaaaaatctgaccagctagagatgcatcatgccaaaataaaggaactagaagatctgaagagaacatttaaggagggtatggatgagttaagaacactgagaacaaaggtgaaatgtctagaagatgaacgattaagaacagaagatgaattatcaaaatataaggaaattattaatcgccaaaaagctgaaattcagaatttattggacaaggtgaaaactgcagatcagctacaggagcagcttcaaagaggtaagcaagaaattgaaaatttgaaagaagaagtggaaagtcttaattctttgattaatgacctacaaaaagacatcgaaggcagtaggaaaagagaatctgagctgctgctgtttacagaaaggctcactagtaagaatgcacagcttcagtctgaatccaattctttgcagtcacaatttgataaagtttcctgtagtgaaagtcagttacaaagccagtgtgaacaaatgaaacagacaaatattaatttggaaagtaggttgttgaaagaggaagaactgcgaaaagaggaagtccaaactctgcaagctgaactcgcttgtagacaaacagaagttaaagcattgagtacccaggtagaagaattaaaagatgagttagtaactcagagacgtaaacatgcctctagtatcaaggatctcaccaaacaacttcagcaagcacgaagaaaattagatcaggttgagagtggaagctatgacaaagaagtcagcagcatgggaagtcgttctagttcatcagggtccctgaatgctcgaagcagtgcagaagatcgatctccagaaaatactgggtcctcagtagctgtggataactttccacaagtagataaggccatgttgattgagagaatagttaggctgcaaaaagcacatgcccggaaaaatgaaaagatagaatttatggaggaccacatcaaacaactggtggaagaaattaggaaaaaaacaaaaataattcaaagttatattttacgagaagaatcaggcacactttcttcagaggcatctgattttaacaaagttcatttaagtagacggggtggcatcatggcatctttatatacatcccatccagctgacaatggattaacattggagctctctttggaaatcaaccgaaaattacaggctgttttggaggatacgttactaaaaaatattactttgaaggaaaatctacaaacacttggaacagaaatagaacgtcttattaaacaccagcatgaactagaacagaggacaaagaaaacctaaaacaagcctcttgctcagtaaagagacaaaagccacacaggagtaggtgccactgacctctattgttggagactttgttccactttttgtttcagccagtaaaaatattgttttgcttcatctgtacacaaaaaaatacccttttacaatatgaatgcattgctgtatatactgtaagactgaaagctttgatgaaatttgtttttgtatggtgcaatatgacagcctgtcattgaatctaaacaacttaatttgcttgtattcataagaagtgttgaacattacaagggcttttat

SEQ ID NO: 251 - protein, 1014 aa, human organism
MVIIYLSFCNYYMEFYREELPHIDYLIDIQFATGKVTQPGEDTSYHQCAQLEARDEGTDSLLLNNGSSATLKTRTRCYGTPRGLPHRSLLQPTPPTCKTKIRSRFEELQSELVPVSMSETDHIASTSSDKNVGKTPELKEDSCNLFSGNESSKLENESKLLSLNTDKTLCQPNEHNNRIEAQENYIPDHGGGEDSCAKTDTGSENSEQIANFPSGNFAKHISKTNETEQKVTQILVELRSSTFPESANEKTYSESPYDTDCTKKFISKIKSVSASEDLLEEIESELLSTEFAEHRVPNGMNKGEHALVLFEKCVQDKYLQQEHIIKKLIKENKKHQELFVDICSEKDNLREELKKRTETEKQHMNTIKQLESRIEELNKEVKASRDQLIAQDVTAKNAVQQLHKEMAQRMEQANKKCEEARQEKEAMVMKYVRGEKESLDLRKEKETLEKKLRDANKELEKNTNKIKQLSQEKGRLHQLYETKEGETTRLIREIDKLKEDINSHVIKVKWAQNKLKAEMDSHKETKDKLKETTTKLTQAKEEADQIRKNCQDMIKTYQESEEIKSNELDAKLRVTKGELEKQMQEKSDQLEMHHAKIKELEDLKRTFKEGMDELRTLRTKVKCLEDERLRTEDELSKYKEIINRQKAEIQNLLDKVKTADQLQEQLQRGKQEIENLKEEVESLNSLINDLQKDIEGSRKRESELLLFTERLTSKNAQLQSESNSLQSQFDKVSCSESQLQSQCEQMKQTNINLESRLLKEEELRKEEVQTLQAELACRQTEVKALSTQVEELKDELVTQRRKHASSIKDLTKQLQQARRKLDQVESGSYDKEVSSMGSRSSSSGSLNARSSAEDRSPENTGSSVAVDNFPQVDKAMLIERIVRLQKAHARKNEKIEFMEDHIKQLVEEIRKKTKIIQSYILREESGTLSSEASDFNKVHLSRRGGIMASLYTSHPADNGLTLELSLEINRKLQAVLEDTLLKNITLKENLQTLGTEIERLIKHQHELEQRTKKT

SEQ ID NO: 252 - DNA, 1491 bp, human organism
ttgccgtgaagggctgtgcggttcccgtgcgcgccggagcctgctgtggcctcttatgcactccaccacccccatcagctccctcttctccttcaccagccccgcagtgaagagactgctaggctggaagcaaggagatgaagaggaaaagtgggcagagaaggcagtggactctctagtgaagaagttaaagaagaagaagggagccatggacgagctggagagggctctcagctgcccggggcagcccagcaaatgcgtcacgattccccgctccctggacgggcggctgcaggtgtcccaccgcaagggcctgccccatgtgatttactgtcgcgtgtggcgctggccggatctgcagtcccaccacgagctgaagccgctggagtgctgtgagttcccatttggctccaagcagaaagaagtgtgcattaacccttaccactaccgccgggtggagactccagtactgcctcctgtgctcgtgccaagacacagtgaatataacccccagctcagcctcctggccaagttccgcagcgcctccctgcacagtgagccactcatgccacacaacgccacctatcctgactctttccagcagcctccgtgctctgcactccctccctcacccagccacgcgttctcccagtccccgtgcacggccagctaccctcactccccaggaagtccttctgagccagagagtccctatcaacactcagttgacacaccacccctgccttatcatgccacagaagcctctgagacccagagtggccaacctgtagatgccacagctgatagacatgtagtgctatcgataccaaatggagactttcgaccagtttgttacgaggagccccagcactggtgctcggtcgcctactatgaactgaacaaccgagttggggagacattccaggcttcctcccgaagtgtgctcatagatgggttcaccgacccttcaaataacaggaacagattctgtcttggacttctttctaatgtaaacagaaactcaacgatagaaaataccaggagacatataggaaagggtgtgcacttgtactacgtcgggggagaggtgtatgccgagtgcgtgagtgacagcagcatctttgtgcagagccggaactgcaactatcaacacggcttccacccagctaccgtctgcaagatccccagcggctgcagcctcaaggtcttcaacaaccagctcttcgctcagctcctggcccagtcagttcaccacggctttgaagtcgtgtatgaactgaccaagatgtgtactatccggatgagttttgttaagggttggggtgctgagtatcatcgccaggatgtcaccagcaccccctgctggattgagattcatcttcatgggccactgcagtggctggacaaagttctgactcagatgggctctccacataaccccatttcttcagtgtcttaacagtcatgtcttaagctgcatttccataggat

SEQ ID NO: 253 - protein, 467 aa, human organism
MHSTTPISSLFSFTSPAVKRLLGWKQGDEEEKWAEKAVDSLVKKLKKKKGAMDELERALSCPGQPSKCVTIPRSLDGRLQVSHRKGLPHVIYCRVWRWPDLQSHHELKPLECCEFPFGSKQKEVCINPYHYRRVETPVLPPVLVPRHSEYNPQLSLLAKFRSASLHSEPLMPHNATYPDSFQQPPCSALPPSPSHAFSQSPCTASYPHSPGSPSEPESPYQHSVDTPPLPYHATEASETQSGQPVDATADRHVVLSIPNGDFRPVCYEEPQHWCSVAYYELNNRVGETFQASSRSVLIDGFTDPSNNRNRFCLGLLSNVNRNSTIENTRRHIGKGVHLYYVGGEVYAECVSDSSIFVQSRNCNYQHGFHPATVCKIPSGCSLKVFNNQLFAQLLAQSVHHGFEVVYELTKMCTIRMSFVKGWGAEYHRQDVTSTPCWIEIHLHGPLQWLDKVLTQMGSPHNPISSVS

SEQ ID NO: 254 - DNA, 5857 bp, human organism
tgcaggtttgcagggtctgagattacttgggcttttcctgcctttttcttttgcttaagggatggacaaggagctgagatttatgacccttattagagaaaaaaatgtgccttgctagggtggggacacttggttgatgcagtctctctctctctttctcggtgtttataacaaaacaaaaccaaaatgaactgaggggtttgtaatggtagtttgtttgttgctggagaatgctactttgcatgctttttttctcttgcagggtatgttctgtcttgtgctttttcttttagaagctactaaagggtgttggggatgcttctgactattatgaaggccaaaaggcctgttgactggggctgcttttaaccctttcctatttgctgagaatgcagccgtgtgacagtaactg[450 bp omitted]cgatctccagtgctgaagagtttgatgacgacgagaagattgaggtggatgacccccctgacaaggaggacatgcgatcaagcttcaggtcgaatgtgttgacggggtcggctccccagcaggactacgataagctgaaggcactcggaggggaaaactccagcaaaactggactctctacgtcaggcaatgtggagaaaaacaaagctgttaagagagaaacagaagccagttctataaacctgagtgtttatgaaccttttaaagtcagaaaagcagaggataaattgaaggaaagctctgacaaggtgctggaaaacagagtcctagatgggaagctgagctccgagaagaatgacaccagcctccccagcgttgcgccatcaaagacaaagtcgtcctccaagctctcgtcctgcatcgctgccatcgcggctctcagcgctaaaaaggcggcttcagactcctgcaaagaaccagtggccaattcgagggaatcctccccgttaccaaaagaagtaaatgacagtccgagagccgctgacaagtctcctgaatcccagaatctcatcgacgggaccaaaaaaccatccctgaagcaaccggatagtcccagaagcatctcaagtgagaacagcagcaaaggatccccgtcctctcccgcagggtccacaccagcaatccccaaagtccgcataaaaaccattaagacatcttctggggaaatcaagagaacagtgaccagggtattgccagaagtggatcttgactctggaaagaaaccttccgagcagacagcgtccgtgatggcctctgtgacatcccttctgtcgtctccagcatcagccgccgtcctttcctctccccccagggcgcctctccagtctgcggtcgtgaccaatgcagtttcccctgcagagctcacccccaaacaggtcacaatcaagcctgtggctactgctttcctcccagtgtctgctgtgaagacggcaggatcccaagtcattaatttgaagctcgctaacaacaccacggtgaaagccacggtcatatctgctgcctctgtccagagtgccagcagcgccatcattaaagctgccaacgccatccagcagcaaactgtcgtggtgccggcatccagcctggccaatgccaaactcgtgccaaagactgtgcaccttgccaaccttaaccttttgcctcagggtgcccaggccacctctgaactccgccaagtgctaaccaaacctcagcaacaaataaagcaggcaataatcaatgcagcagcctcgcaaccccccaaaaaggtgtctcgagtccaggtggtgtcgtccttgcagagttctgtggtggaagctttcaacaaggtgctgagcagtgtcaatccagtccctgtttacatcccaaacctcagtcctcccgccaatgcagggatcacgttaccgacgcgtgggtacaagtgcttggagtgtggggactcctttgcacttgaaaagagtctgacccagcactacgacagacggagcgtgcgcatcgaagtaacgtgcaaccattgtacaaagaacctcgttttttacaacaaatgcagcctcctttcccatgcccgtgggcataaggagaaaggggtggtaatgcaatgctcccacttaattttaaagccagtcccagcagatcaaatgatagtttctccgtcaagcaatacttccacttcaacttccactcttcagagccctgtgggagctggcacacacactgtcacaaaaattcagtctggcataactgggacagtcatatcggctccttcaagcactcccatcaccccagccatgcccctagatgaagacccctccaaactgtgtagacatagtctaaaatgtttggagtgtaatgaagtcttccaggacgagacatcactggctacacatttccagcaggctgcagatacgagtggacaaaagacttgcactatctgccagatgctgcttcctaaccagtgcagttatgcatcacaccagagaatccatcagcacaaatctccctacacctgccctgagtgtggggccatctgcaggtcggtgcacttccagacccacgtcaccaagaactgtctgcactacacgaggagagttggttttcgatgtgtgcattgcaatgttgtgtactctgatgtggctgctctgaagtctcacattcaaggttctcactgtgaagtcttctacaagtgtcctatttgtccaatggcgtttaagtctgccccaagcacacattcccacgcctacacacagcatcctggcatcaagataggagaaccaaaaataatatataagtgttccatgtgcgacactgtgttcaccctgcaaaccttgctgtatcgccactttgaccaacacattgaaaaccagaaggtgtctgttttcaagtgtccagactgttctcttttatatgcacagaagcaacttatgatggaccatatcaagtctatgcatggaacattgaaaagtattgaagggcctccaaacttgggtataaacttgcctttgagcattaagcctgcaactcaaaattcagcaaatcagaacaaagaggacaccaaatccatgaatgggaaagagaaattggaaaagaaatctccatctcctgtgaaaaaatcaatggaaaccaagaaagtggccagtcctgggtggacgtgttgggagtgtgactgcctgttcatgcagagagatgtgtacatatcccacgtgaggaaggagcacgggaagcaaatgaagaaacacccctgccgccagtgtgacaagtctttcagctcgtcccacagcctgtgccggcacaaccggatcaagcacaaaggcatcaggaaagtgtacgcctgctcgcactgcccagactccagacgtacctttaccaaacgtttgatgctggagaagcacgtccagctgatgcatggcatcaaggaccctgacctgaaagaaatgacagatgccaccaatgaggaggaaacagaaataaaagaagacactaaggtccccagtcccaagcggaagttggaagaaccagttctggagttcaggcctccccgaggagcaatcactcaaccactgaaaaagctgaaaatcaatgtttttaaggttcacaagtgtgccgtgtgtggcttcaccaccgaaaacctgctgcaattccacgaacacatccctcagcacaaatcggatggttcttcctaccagtgccgggagtgtggcctctgctacacgtctcacgtctctctgtccaggcacctcttcatcgtacacaagttaaaggaacctcagccagtgtccaagcaaaatggggctggggaagataaccaacaggagaacaaacccagccacgaggatgaatcccctgatggcgccgtgtcagacagaaagtgcaaagtgtgcgcaaaaacttttgaaactgaagctgccttaaatactcacatgcggacacacggcatggccttcatcaaatccaaaaggatgagctcagccgagaaatagccacagatgctccatgaggaaaatccctgtccacattggaataaaaaagacatttttgttacaaagtttgcagtataatagagttaacagtactgtctaggctgttgcaatatattctctttcaatgtaccttccttcacctcgtcgtatatatcctcgataagtattaaaacagtatttgagtttaaaagagtttgtatatatttaaatgaataactttttatactctttgttacatgtttgtatcagtatttagtggaaaaccatttgagttgttttgggttagaatttttctttttgtactgtttctttaaaacagagttcttagtaacaggggcagttcctgaattcaaataaaccattttgtatgtttggattttgaatgggttaactaattacaggctaaaataatgccttttttagtgtttttaatttttagaattcactacataaattgtaagtaattgtgggtctcaaaaacactaggaacttttaagtgtcttagcacttcctcgatgtgcctgccctgagggagtgagttcacatttgagacaactgcactccagtgtggacgtgcctttgtcttcaggccatgccgaagggtgtttaaagcagtcttgcaggtcgctcctttcccagccgtggataaaaactgaagctaggaatctaataaggaatgctgatttcctcagttccattttgaggaatggggaaggctattctaaagaaaaaaatgggatttgttttctcggcagatctgcaaggctggctttaagagcacaaggagggaaagtaacgaaagggctggactactataaaagttacaaatacgtagttagaccaatagatttatatagtcaggtttttgtcatgtaatttattaactaactattacagaaacacagctaagaatatcaagtatttctctggctcttgacagaaaaaaatcagttgacttaaccctttgctgtcaaaagagttggcgtttcctgttctgggtgctactgccaaacgttatggtacttagagtcgggatgcacaacttcaaccaccgacttatcaatgcagccgcctgtgtattgcaattggccgttaccttaagcactgagccacccgggtttagttcagccatttcaagaagtatatttaacgtcggtagttctgctttattaaaatgcagcagaggtactcttctgtcccttccgtttatagttctctgagagagttctattttttggttttgttttgtgttttcttttgcattttgtatcttgtatttatccctgaacatgttttgtaccttttttttttttttttttttaagaaaaggaattcttttgtgtatatatagatacttgcatgatatactgtagtcaatgttcggttcctcaaaaggtcttgctgctgtcaggtgttatgcactccatccatcataactgtatgaaacacatttcatatgtaaataaacgtgggacatttg

SEQ ID NO: 255 - protein, 1296 aa, human organism [sequence omitted]

SEQ ID NO: 256 - DNA, 2788 bp, human organism
ttttcgtcgactcttaccggttggctgggccagctgcgccgcggctcacagctgacgatgggggaccccagcaagcaggacatcttgaccatcttcaagcgcctccgctcggtgcccactaacaaggtgtgttttgattgtggtgccaaaaatcccagctgggcaagcataacctatggagtgttcctttgcattgattgctcagggtcccaccggtcacttggtgttcacttgagttttattcgatctacagagttggattccaactggtcatggtttcagttgcgatgcatgcaagtcggaggaaacgctagtgcatcttccttttttcatcaacatgggtgttccaccaatgacaccaatgccaagtacaacagtcgtgctgctcagctctatagggagaaaatcaaatcgctcgcctctcaagcaacacggaagcatggcactgatctgtggcttgatagttgtgtggttccacctttgtcccctccaccaaaggaggaagatttttttgcctctcacgtttctcctgaggtgagtgacacagcgtgggcatcagcaatagcagaaccatcttctttaacatcaaggcctgtggaaaccactttggaaaataatgaaggtggacaagagcaaggaccaagtgtggaaggtcttaatgtaccaacaaaggctactttagaggtatcctctatcataaaaaagaaaccaaatcaagctaaaaaaggccttggggccaaaaaaggaagtttgggagctcagaaactggcaaacacatgctttaatgaaattgaaaaacaagctcaagctgcggataaaatgaaggagcaggaagacctggccaaggtggtatctaaagaagaatcaattgtttcatcattacgattagcctataaggatcttgaaattcaaatgaagaaagacgaaaagatgaacattagtggcaaaaaaaatgttgactcagacagactcggcatgggatttggaaattgcagaagtgttatttcacattcagtgacttcagatatgcagaccatagagcaggaatcacccattatggcaaaaccaagaaaaaagtataatgatgacagtgacgattcatattttacttccagctcaagttactttgacgagccagtggagttaaggagcagttctttctctagctgggatgacagttcagattcctattggaaaaaagagaccagcaaagatactgaaacagttctgaaaaccacaggctattcagacagacctactgctcgccgcaagccagattatgagccagttgaaaatacagatgaggcccagaagaagtttggcaatgtcaaggccatttcatcagatatgtattttggaagacaatcccaggctgattatgagaccagggcccgcctagagaggctgtcggcaagttcctccataagctcggctgatctgttcgaggagccgaggaagcagccagcagggaactacagcctgtccagtgtgctgcccaacgcccccgacatggcgcagttcaagcagggagtgagatcggttgctggaaaactctccgtctttgctaatggagtcgtgacttcaattcaggatcgctacggttcttaatactgaagtcatgatgtgtatttcctggagaaattcctctttaaatgaacaagtaaccacatctcaggcggcagtgaagtccagatagttttgcagattgttttgctactttttcatatggtatatgtttctgatttttaatatttcttttgagaaattctgagttctgatgtaggagctttcctgtgatttctgtttcacgttccttcctgtcacaccctcctttggcgtctctgtgtatatccttgctttattttcttggaacctttgatttcaacactgagggcctggagacctcggctcctcctgctcctgaaccaggaggcttcatgtgggggaggaggagaggtctccatgtgacacatgggctcagggctgccagaatcagcggatgctggatgggcctgcagaaacaacactcaccacacacacttccttcaaaagaccaaaagtgactggtgtctcgtgtgacagattgcttcatttatgtttctacatagtaaggtgactgccaaataatatttgaagtcatctgtctctttgtaaattattttatatgacctataaatttaaaaatgtttttcagtgagtgcttttaacaaacttaagcttctgccctgccaagggaattaatgttatcttgtgaaaggtgttgctgtttgaattgatgagaaatggaagatgagaactccctaagagttctcataataaatcatctcatcacaaatcaatacggtatacagagttaaagtggaatgaggtaagaagatacagctacagaaaatagttgcgtgtatgggagaacagtcattgtaattgggtagttttgttaataaatatttttaaatcttgcttttcagaaattaccgaatgtgtataaacaaataaagaaaaataatttagctgtgttttagacagcattagaatatattgttcagcacagtaaaatatatttgaaatttgataagccaaaaatgtggttttgaatgaatattttgtgaatctttcttaaaagctcaaatttgtagacttctaaatagaataaacacttgcagcagaaaaaaaaaaaaaaaaaaaaaaaaaaaaaaaaaaaaaaaaaaaaaaaaaaaaaaaaaaaaaaaaaaaaaaaaaaaaaaaaaaaaaaaaaaaaaaaaaaaaaaaaaaaaaaaaaaaaaaaaaa

SEQ ID NO: 257 - protein, 516 aa, human organism
MGDPSKQDILTIFKRLRSVPTNKVCFDCGAKNPSWASITYGVFLCIDCSGSHRSLGVHLSFIRSTELDSNWSWFQLRCMQVGGNASASSFFHQHGCSTNDTNAKYNSRAAQLYREKIKSLASQATRKHGTDLWLDSCVVPPLSPPPKEEDFFASHVSPEVSDTAWASAIAEPSSLTSRPVETTLENNEGGQEQGPSVEGLNVPTKATLEVSSIIKKKPNQAKKGLGAKKGSLGAQKLANTCFNEIEKQAQAADKMKEQEDLAKVVSKEESIVSSLRLAYKDLEIQMKKDEKMNISGKKNVDSDRLGMGFGNCRSVISHSVTSDMQTIEQESPIMAKPRKKYNDDSDDSYFTSSSSYFDEPVELRSSSFSSWDDSSDSYWKKETSKDTETVLKTTGYSDRPTARRKPDYEPVENTDEAQKKFGNVKAISSDMYFGRQSQADYETRARLERLSASSSISSADLFEEPRKQPAGNYSLSSVLPNAPDMAQFKQGVRSVAGKLSVFANGVVTSIQDRYGS

SEQ ID NO: 258 - DNA, 5571 bp, human organism
atggatactgtcatgaagcagacacatgctgacacacctgttgatcattgtctatctggcataagaaagtgtagcagcacctttaagcttaaaagtgaagtcaacaagcatgaaacagcccttgaaatgcagaatccaaatttgaacaataaagaatgttgtttcacctttacgttgaatggaaactccagaaaattagaccgtagtgtgtttacagcatatggtaaacccagcgagagtatctactcagccctgagtgctaatgactatttcagtgaaaggataaagaatcagtttaataagaacattattgtttatgaagaaaagacaatagatggacatataaatttaggaatgcctctcaagtgcctgcctagtgattctcattttaaaattacatttggtcaaagaaagagtagcaaagaagatggacacatattacgccaatgtgaaaatccaaacatggaatgcattctttttcatgttgttgctataggaaggacaagaaagaagattgttaagatcaacgaacttcatgaaaaaggaagtaaactttgtatttatgccttgaagggtgagactattgaaggagccttatgcaaggatggccgttttcggtctgacataggtgaatttgaatggaaactaaaggaaggtcataagaaaatttatggaaaacagtccatggtggatgaagtatctggaaaagtcttagaaatggacatttcaaaaaaaaaagcattacaacagaaagatatccataaaaaaattaaacagaatgaaagtgccactgatgaaattaatcaccagagtctgatacagtctaagaaaaaagtccacaaaccaaagaaagatggagagaccaaagatgtagaacacagcagagagcaaattctcccacctcaggatctaagccattatattaaagataaaactcgccagacaattcccaggattagaaattattacttttgtagtttgccccgaaaatataggcaaataaactcacaagttagacggaggccgcatctgggtaggcggtatgctattaatctggatgtccaaaaggaggcaattaatctcttaaagaattatcaaacgttgaatgaagccataatgcatcagtatccgaattttaaagaggaggcacagtgggtaagaaaatattttcgggaagaacaaaagagaatgaatctttcaccagctaagcaattcaacatatataaaaaggacttcggaaaaatgactgcaaattctgtttcagttgcaacctgcgaacagcttacatattatagcaagtcagttgggttcatgcaatgggacaataatggaaacacaggtaatgctacttgctttgtcttcaatggtggttatattttcacctgtcgacatgttgtacatcttatggtgggtaaaaacacacatccaagtttgtggccagatataattagcaaatgtgcgaaggtaaccttcacttatacagagttctgccctactcctgacaattggttttccattgagccatggcttaaagtgtccaatgaaaatctagattatgccattttaaaactaaaagaaaatggaaatgcgtttcctccaggactatggcgacagatttctcctcaaccatctactggtttgatttatttaattggtcatcctgaaggccagatcaagaaaatagatggttgtactgtgattcctctaaacgaacgattgaaaaaatatccaaacgattgtcaagatgggttggtagatctctatgataccaccagtaatgtatactgtatgtttacccaaagaagtttcctatcagaggtttggaacacacacacgcttagttatgatacttgtttctctgatgggtcctcaggctccccagtgtttaatgcatctggcaaattggttgctttgcatacctttgggcttttttatcaacgaggatttaatgtgcatgcccttattgaatttggttattctatggattctattctttgtgatattaaaaagacaaatgagagcttgtataaatcattaaatgatgagaaacttgagacctacgatgaagagaaagcccggcccaggccagcctaccggcgactaggatgctttcgctttcgctctcgctttccaatactcgggactggggaaaccgggagaatagaagcaggcaaggaccgccgtgggcacggggtcagtgagacagggtcctgctcgcggcgtcaaggaggagcgctgtgggtgtccccagcgcagccaatcggcttccgaagtagctggagctctggagcctttgcttcctcaaatacgagcgggaactgcgttgagcgctggattccaggccgagtgctggcgaggcgcgcagtctctaaagagcaacagaataattgcagtacttctctaatgaggatggagtctagaggagacccaagagccacaactaatacccaggctcaaagattccattcacctaagaaaaatccagaagaccagaccatgccccaaaataggacaatatatgttaccttgaaggctgtcagaaaagagatagaaactcaccaaggccaagaaatgcttgtgcgtggcacagaaggaatcaaagagtacataaaccttggaatgcccctcagttgtttccctgaaggtggccaggtggtcattacattttcccaaagtaaaagtaagcagaaggaagataaccacatatttggcaggcaggacaaagcatcgactgaatgtgtcaaattttacattcatgcaattggaattgggaagtgtaaaagaaggattgttaaatgtgggaagcttcacaaaaaggggcgcaaactctgtgtttatgctttcaaaggagaaaccatcaaggatgcactgtgcaaggatggcagatttctttcctttctggagaatgatgattggaaactcattgaaaacaatgacaccattttagaaagcacccagccagttgatgaattagaaggcagatactttcaggttgaggttgagaaaagaatggtccccagtgcagcagcttctcagaatcctgagtcagagaaaagaaacacctgtgtgttgagagaacaaatcgtggctcagtaccccagtttgaaaagagaaagtgaaaaaatcattgaaaacttcaagaaaaaaatgaaagtaaaaaatggggaaacattatttgaattgcatagaacaacgtttgggaaagtaacaaaaaattcttcttcgattaaagtagtgaaacttcttgtacgtctcagtgactcagttgggtacttattctgggacagtgcaactacgggttacgccacctgctttgtttttaaaggattgttcattttaacttgtcggcatgtaatagatagcattgtgggagacggaatagagccaagtaagtgggcaaccataattggtcaatgtgtaagggtgacatttggttatgaagagctaaaagacaaggaaacaaactacttttttgttgaaccttggtttgagatacataatgaagagcttgactatgctgtcctgaaactgaaggaaaatggacaacaagtacctatggaactatataatggaattactcctgtgccacttagtgggttgatacatattattggccatccatatggagaaaaaaagcagattgatgcttgtgctgtgatccctcagggtcagcgagcaaagaaatgtcaggaacgtgttcagtctaaaaaagcagaaagtccagagtatgtccatatgtatactcaaagaagtttccagaaaatagttcacaaccctgatgtgattacctatgacactgaatttttctttggggcttccggctcccctgtgtttgattcaaaaggttcattggtggccatgcatgctgctggctttgcttatacttaccaaaatgagactcgtagtatcattgagtttggctctaccatggaatccatcctccttgatattaagcaaagacataaaccatggtatgaagaagtatttgtaaatcagcaggatgtagaaatgatgagtgatgaggacttgtgagaattcagtctactggatttaagggaatggcttatggagttgttatttcgtaggcattgaaaatggttttctaaactccaaaatggtcatcttatcaataataataatattgaccatttcctatctgccaggcatttttctaagcacatgaagaaattagtcctaacaacactatgagatggactataacttgcccaaattttttttttttttgagactgagtctcactctgtcgcctgggctggagtacagtggtgcgatctcagctcactgcaacttccacctcccaggttcaagcgattcttatgcctcagtctcctgagcagctgggattacaggcaaacgccaccacacccagctaaattttttttttttttttgtatttttagtagagacagggtttcaccatgttggtcaggcgggtctcgaactcctgacctcgtgatccacctgcctcggccttccaaagtgctgggattacaagtttgagccactgcacctggctaacttgccctattttaaagtcaagcaatgggaagaataacaagattatatagtaatcagtttcatgacactaaaagtcatatagtcatagggttttttcatctttcatatctttgcctaaattcatttgctacagtgcaggaaccaaaacttgttcatctcatgattccctacatctgacataaggaaagtaagtgctcagaaaaatgtgcaggtcaataagttgcaaaagttggggctgcaattaatgctaacataagagctaaatgcttgattagaaatgatctcaaaaccttttagaatttccaaaatcttcatattactgaaactgtcggaatatatgggtcctgaaattcagaagatgatagtcactcttcccatatttataggctattaaggcaagggatatcttaaacatcatattactttatttagatttctactactccaattattaatgttatgtatttctcattgttttacttcttcatggtattatgaagactatatagatgattcaaccaagcctgcaaatctccctcttgtggaattccactggacccaatctgttttccatttccattgcaatactactaaagccatacaatatcaagcaccctccctctaggtccagggactatcacagaagaagcaggcatgtaagattttaaggactggtttcgaggggtcgagtgtaggaaaacagcctgttgcattgtaagagtgatgtcaccttgaagagcagctggcatgatgactgctgtttgactcctgcataccaagatattctgcagcaatgtctttaaacagtgccggtagtacagataacccctcataaagatgcttatctaacctccccagtgttcaggtgtttcacaagaaagtctgagatatgactagctacacgttttgccaaaaatgcttgttatataaagggtacttttgggagggtgagtgccgccatttagtggctgctagaaacattgcttctgtttgtaagttcctattaaatgttctttctgagaaaaaaaaaaa

SEQ ID NO: 259 - protein, 1343 aa, human organism [sequence omitted]

SEQ ID NO: 260 - DNA, 2829 bp, human organism
acatttcaaaaaaaatacatagactgatgtttcagacttgtgcagcataagcctacagggtacgaagaatgaactctgagaatgtttggagaatgtttcatcattactaacaggatattcctcatgacattgctgtctgatctttgaccatcagtctgtgacctgccccttctctttacatgcagccgctctctgctccctgccccaatgaacatctgcactaggcccaagccttggagtaatttacctgaagagtgacaccattgattttgaaactactgaagaaacccaagacagctgaaaaccagaaggcatctgaggagaatgagattactcagccgggtggatccagcgccaagccgggccttccctgcctgaactttgaagctgttttgtctccagacccagccctcatccactcaacacattcactgacaaactctcacgctcacaccgggtcatctgattgtgacatcagttgcaaggggatgaccgagcgcattcacagcatcaaccttcacaacttcagcaattccgtgctcgagaccctcaacgagcagcgcaaccgtggccacttctgtgacgtaacggtgcgcatccacgggagcatgctgcgcgcacaccgctgcgtgctggcagccggcagccccttcttccaggacaaactgctgcttggctacagcgacatcgagatcccgtcggtggtgtcagtgcagtcagtgcaaaagctcattgacttcatgtacagcggcgtgctacgggtctcgcagtcggaagctctgcagatcctcacggccgccagcatcctgcagatcaaaacagtcatcgacgagtgcacgcgcatcgtgtcacagaacgtgggcgatgtgttcccggggatccaggactcgggccaggacacgccgcggggcactcccgagtcaggcacgtcaggccagagcagcgacacggagtcgggctacctgcagagccacccacagcacagcgtggacaggatctactcggcactctacgcgtgctccatgcagaatggcagcggcgagcgctctttttacagcggcgcagtggtcagccaccacgagactgcgctcggcctgccccgcgaccaccacatggaagaccccagctggatcacacgcatccatgagcgctcgcagcagatggagcgctacctgtccaccacccccgagaccacgcactgccgcaagcagccccggcctgtgcgcatccagaccctagtgggcaacatccacatcaagcaggagatggaggacgattacgactactacgggcagcaaagggtgcagatcctggaacgcaacgaatccgaggagtgcacggaagacacagaccaggccgagggcaccgagagtgagcccaaaggtgaaagcttcgactcgggcgtcagctcctccataggcaccgagcctgactcggtggagcagcagtttgggcctggggcggcgcgggacagccaggctgaacccacccaacccgagcaggctgcagaagcccccgctgagggtggtccgcagacaaaccagctagaaacaggtgcttcctctccggagagaagcaatgaagtggagatggacagcactgttatcactgtcagcaacagctccgacaagagcgtcctacaacagccttcggtcaacacgtccatcgggcagccattgccaagtacccagctctacttacgccagacagaaaccctcaccagcaacctgaggatgcctctgaccttgaccagcaacacgcaggtcattggcacagctggcaacacctacctgccagccctcttcactacccagcccgcgggcagtggccccaagcctttcctcttcagcctgccacagcccctggcaggccagcagacccagtttgtgacagtgtcccagcccggtctgtcgacctttactgcacagctgccagcgccacagcccctggcctcatccgcaggccacagcacagccagtgggcaaggcgaaaaaaagccttatgagtgcactctctgcaacaagactttcaccgccaaacagaactacgtcaagcacatgttcgtacacacaggtgagaagccccaccaatgcagcatctgttggcgctccttctccttaaaggattaccttatcaagcacatggtgacacacacaggagtgagggcataccagtgtagtatctgcaacaagcgcttcacccagaagagctccctcaacgtgcacatgcgcctccaccggggagagaagtcctacgagtgctacatctgcaaaaagaagttctctcacaagaccctcctggagcgacacgtggccctgcacagtgccagcaatgggaccccccctgcaggcacacccccaggtgcccgcgctggccccccaggcgtggtggcctgcacggaggggaccacttacgtctgctccgtctgcccagcaaagtttgaccaaatcgagcagttcaacgaccacatgaggatgcatgtgtctgacggataagtagtatctttctctctttcttatgaacaaaacaaaacaacaacaaaaaacaaacaaacaaaaaagctatggcactagaatttaagaaatgttttggtttcatttttactttctgtttttgtttttgtttcgtttcattttgtactacatgaagaactgttttttgcctgctggtacattacatttccggaggcttgggtgaataatagttttcccagtctccctcggatggtggccttaaggcctggtagtgcttcaagaggtccactggttggatctctagctactggcctctaaatacaacccttctttacaaaaaaaaaaaaaaaaaaaa

SEQ ID NO: 261 - protein, 668 aa, human organism
MTERIHSINLHNFSNSVLETLNEQRNRGHFCDVTVRIHGSMLRAHRCVLAAGSPFFQDKLLLGYSDIEIPSVVSVQSVQKLIDFMYSGVLRVSQSEALQILTAASILQIKTVIDECTRIVSQNVGDVFPGIQDSGQDTPRGTPESGTSGQSSDTESGYLQSHPQHSVDRIYSALYACSMQNGSGERSFYSGAVVSHHETALGLPRDHHMEDPSWITRIHERSQQMERYLSTTPETTHCRKQPRPVRIQTLVGNIHIKQEMEDDYDYYGQQRVQILERNESEECTEDTDQAEGTESEPKGESFDSGVSSSIGTEPDSVEQQFGPGAARDSQAEPTQPEQAAEAPAEGGPQTNQLETGASSPERSNEVEMDSTVITVSNSSDKSVLQQPSVNTSIGQPLPSTQLYLRQTETLTSNLRMPLTLTSNTQVIGTAGNTYLPALFTTQPAGSGPKPFLFSLPQPLAGQQTQFVTVSQPGLSTFTAQLPAPQPLASSAGHSTASGQGEKKPYECTLCNKTFTAKQNYVKHMFVHTGEKPHQCSICWRSFSLKDYLIKHMVTHTGVRAYQCSICNKRFTQKSSLNVHMRLHRGEKSYECYICKKKFSHKTLLERHVALHSASNGTPPAGTPPGARAGPPGVVACTEGTTYVCSVCPAKFDQIEQFNDHMRMHVSDG

SEQ ID NO: 262 - DNA, 912 bp, human organism
atggtggaagaggaaacaggcatatcttacatggtggcagacaagggacacccttctacaaactctaccacttctgcgccgtcgtttcgaccatataaaaacgacctatgcgaactgcgtcggaaaactccctcacgatgtaaaacgaagatcaggagcagatttgaagaattacaaagtgaattggtgccagtcagcatgtcagagacagaccacatagcctctacttcctctgataaaaatgttgggaaaacacctgaattaaaggaagactcatgcaacttgttttctggcaatgaaagcagcaaattagaaaatgagtccaaactattgtcattaaacactgataaaactttatgtcaacctaatgagcataataatcgaattgaagcccaggaaaattatattccagatcatggtggaggtgaggattcttgtgccaaaacagacacaggctcagaaaattctgaacaaatagctaattttcctagtggaaattttgctaaacatatttcaaaaacaaatgaaacagaacagaaagtaacacaaatattggtggaattaaggtcatctacatttccagaatcagctaatgaaaagacttattcagaaagcccctatgatacagactgcaccaagaaatttatttcaaaaataaagagcgtttcagcatcagaggatttgttggaagaaatagaatctgagctcttatctacggagtttgcagaacatcgagtaccaaatggaatgaataagggagaacatgcattagttctgtttgaaaagtgtgtgcaagataaatatttgcagcaggaacatatcataaaaaaggccagacttggtctctgttatttgccatcaagaacctcaattgacacgttaattccgtttatcccaaatttatatagataa

SEQ ID NO: 263 - protein, 219 aa, human organism
MEPKEATGKENMVTKKKNLAFLRSRLYMLERRKTDTVVESSVSGDHSGTLRRSQSDRTEYNQKLQEKMTPQGECSVAETLTPEEEHHMKRMMAKREKIIKELIQTEKDYLNDLELCVREVVQPLRNKKTDRLDVDSLFSNIESVHQISAKLLSLLEEATTDVEPAMQVIGEVFLQIKGPLEDIYKIYCYHHDEAHSILESYEKEEELKEHLSHCIQSLK

SEQ ID NO: 264 - DNA, 3812 bp, human organism
gggcctactctgccgccgccgccgcccgcccgctccagccgccgccgccgccgccaccgccctccaggctccgggacccggcccgcgccaccgcccccgtgcgcgccccgccgccgccgccttcgccttcgccttttgtttcctccgctccggcgcccccgccccggctcgcgctttgcaggggacgcagcgcgcgcccccagcgggcccgggaaaagccgcggcgcgcgcgcgcgcctgcgcggcggacccctccttctcctccccgcgtgcgcgtgcccttcttggctgcgcgccggcgccgcctggcgggcgggaggggaggtggcaggcgcgtttgcaggaggggcgcacctcttcgctcgcgcacccccccggaaggtagaccgggaaggggaggcgggcgggcggagaggagagagtggcgcgcagtccagcgagggcgggggttggctatgtggggggtggtgcaccccgcagtctagacagtctgatccgggctgggggcgtgtacactcggcgcacctgcgagactacagagcctcgggccggcacgtgtggggagtgtggacacgtctgctgcgccccgcttctcgctgctgaggggaagggagggggcgggcaggtgcagcggccgggctagtgggagggggcggcggccatggagcgggtgaacgacgcttcgtgcggcccgtctggctgctacacataccaggtgagcagacacagcacggagatgctgcacaacctgaaccagcagcgcaaaaacggcgggcgcttctgcgacgtgctcttgcgggtaggcgacgagagcttcccagcgcaccgcgccgtgctggccgcctgcagcgagtactttgagtcggtgttcagcgcccagttgggcgacggcggagctgcggacgggggtccggctgatgtagggggcgcgacggcagcaccaggcggcggggccgggggcagccgggagctggagatgcacactatcagctccaaggtatttggggacattctggacttcgcctacacttcccgcatcgtggtgcgcttggagagctttcccgaactcatgacggccgccaagttcctgctgatgaggtcggttatcgagatctgccaggaagtcatcaaacagtccaacgtacagatcctggtaccccctgcccgcgccgatataatgctctttcgcccccctgggacctcggacttgggcttccctttggacatgaccaacggggcagccttggcagccaacagcaatggcatcgccggcagcatgcagccagaggaggaggcagctcgggcggctggtgcagccattgcaggccaagcctctttgcctgtgttacctggggtggaccgcttgcccatggtggctggacccctatccccccaactgctgacttccccattccccagtgtggcatccagtgcccctcccctgactggcaagcgaggccggggccgcccaaggaaggccaacctgctggactcaatgtttgggtccccagggggcctgagggaggcaggcatccttccatgcggtctatgtggtaaggtgttcactgatgccaaccggctccggcagcacgaggcccagcacggtgtcaccagcctccagctgggctacatcgaccttcctcctccgaggctgggtgagaatgggctacccatctctgaagaccccgacggcccccgaaagaggagccggaccaggaagcaggtggcttgtgagatctgcggcaagatcttccgtgatgtgtatcatcttaaccggcacaagctgtcccactctggggagaagccctactcctgccctgtgtgtgggttgcggttcaagagaaaagaccgcatgtcctaccatgtgcggtcccatgatgggtccgtgggcaagccttacatctgccagagctgtgggaaaggcttctccaggcctgatcacttgaacggacatatcaagcaggtgcacacttctgagcggcctcacaagtgtcagacctgcaatgcttcttttgccacccgagaccgtctgcgctcccacctggcctgtcatgaagacaaggtgccctgccaggtgtgtgggaagtacttgcgggcagcatacatggcagaccacctgaagaagcacagcgaggggcccagcaacttctgcagtatctgtaaccgaggtttctcctctgcctcctacttaaaggtccatgttaaaacccaccacggtgttccccttccccaggtctccaggcaccaggagcccatcctgaatgggggagcagcgttccactgcgccaggacctatggcaacaaagaaggccagaaatgctcacatcaggatccgattgagagctctgactcctatggtgacctctcagatgccagcgacctgaagacgccagagaagcagagtgccaatggctctttctcctgcgacatggcagtccccaaaaacaaaatggagtctgatggggagaagaagtacccatgccctgaatgtgggagcttcttccgctctaagtcctacttgaacaaacacatccagaaggtgcatgtccgggctctcgggggccccctgggggacctgggccctgcccttggctcacctttctctcctcagcagaacatgtctctcctcgagtcctttgggtttcagattgttcagtcggcatttgcgtcatctttagtagatcctgaggttgaccagcagcccatggggcctgaagggaaatgaggcagctgctgtgtccccacggaaacaaccatctggggactgctgggaaatgctgtgaatgcggagggaagtgatgtttgggttctgtagctgagagatttttattcatttttaactgccccccaaccccactccaactccttctccaccacccattctcccaatggtctttagaaatagattttcatctgatattctgcagaaatatcaatgagacttggtatgggacaggggcagaaaacactacataggcctccaaggcaaaaccagtcccagtttctttaatgggaagaagctggaattcctggtgctcaattcttagtgaccccaatcctatacccaaatctatgatattctgggacctcagtgattttggtcccctcccacttctctagttcgtcatcctcccttcccatatccttcaaaagaaccacactagggtctccacctacttatacaatgcggatgcccaactgtttttaaggaagccagaagcatcccatggaccatggggtgagtgtcctccaagagccccctgagctcagccctctgcctggagggctccagacctttctgagccctgcttggaggcgagcattttcactgctaggacaagctcagctgttgaggacacccccaccccaaatttcagttcttacgtgattttaaccattcaacatgctgttgggttttaattctctaattattattattattgttattattttttaggaccagttgtagtgaattgctactgaaagctatcccaggtgatacagagctctttgtaaaccgcagtcacacattagggttagtattaaactttgtttagatgtaccataattaacttggctagttgattgtttgaagtctatggaagaaatagttttatgcaaaattttaaaaaatgccagtctggtcagggaagtagggggtttcaatgctgttgggaaccaggaaggtgggacagccggcaggtagggacattgtgtacctcagttgtgtcacatgtgagcaagcccaggttgaccttgtgatgtgaattgatctgatcagactgtattaaaaatgttagtacattactcta

SEQ ID NO: 265 - protein, 641 aa, human organism
MERVNDASCGPSGCYTYQVSRHSTEMLHNLNQQRKNGGRFCDVLLRVGDESFPAHRAVLAACSEYFESVFSAQLGDGGAADGGPADVGGATAAPGGGAGGSRELEMHTISSKVFGDILDFAYTSRIVVRLESFPELMTAAKFLLMRSVIEICQEVIKQSNVQILVPPARADIMLFRPPGTSDLGFPLDMTNGAALAANSNGIAGSMQPEEEAARAAGAAIAGQASLPVLPGVDRLPMVAGPLSPQLLTSPFPSVASSAPPLTGKRGRGRPRKANLLDSMFGSPGGLREAGILPCGLCGKVFTDANRLRQHEAQHGVTSLQLGYIDLPPPRLGENGLPISEDPDGPRKRSRTRKQVACEICGKIFRDVYHLNRHKLSHSGEKPYSCPVCGLRFKRKDRMSYHVRSHDGSVGKPYICQSCGKGFSRPDHLNGHIKQVHTSERPHKCQTCNASFATRDRLRSHLACHEDKVPCQVCGKYLRAAYMADHLKKHSEGPSNFCSICNREGQKCSHQDPIESSDSYGDLSDASDLKTPEKQSANGSFSCDMAVPKNKMESDGEKKYPCPECGSFFRSKSYLNKHIQKVHVRALGGPLGDLGPALGSPFSPQQNMSLLESFGFQIVQSAFASSLVDPEVDQQPMGPEGK

SEQ ID NO: 266 - DNA, 2818 bp, human organism
ccctactccgcctctcgggatcctttaagaggcggggcttggctgccagctccgcggcccgggcaaaaggctgggactttactccgggtggcggcgaggacgagtctgtgctccatcagctgccgcacccgccgcctcccgcccccaaaccccatccccgcggttgagccacgatgagcggcagagtcggcgatctgagccccaggcagaaggaggcattggccaagtttcgggagaatgtccaggatgtgctgccggccctgccgaatccagatgactattttctcctgcgttggctccgagccagaagcttcgacctgcagaagtcggaggccatgctccggaagcatgtggagttccgaaagcaaaaggacattgacaacatcattagctggcagcctccagaggtgatccaacagtatctgtcagggggtatgtgtggctatgacctggatggctgcccagtctggtacgacataattggacctctggatgccaagggtctgctgttctcagcctccaaacaggacctgctgaggaccaagatgcgggagtgtgagctgcttctgcaagagtgtgcccaccagaccacaaagttggggaggaaggtggagaccatcaccataatttatgactgcgaggggcttggcctcaagcatctctggaagcctgctgtggaggcctatggagagtttctctgcatgtttgaggaaaattatcccgaaacactgaagcgtctttttgttgttaaagcccccaaactgtttcctgtggcctataacctcatcaaacccttcctgagtgaggacactcgtaagaagatcatggtcctgggagcaaattggaaggaggttttactgaaacatatcagccctgaccaggtgcctgtggagtatgggggcaccatgactgaccctgatggaaaccccaagtgcaaatccaagatcaactacgggggtgacatccccaggaagtattatgtgcgagaccaggtgaaacagcagtatgaacacagcgtgcagatttcccgtggctcctcccaccaagtggagtatgagatcctcttccctggctgtgtcctcaggtggcagtttatgtcagatggagcggatgttggttttgggattttcctgaagaccaagatgggagagaggcagcgggcaggggagatgacagaggtgctgcccaaccagaggtacaactcccacctggtccctgaagatgggaccctcacctgcagtgatcctggcatctatgtcctgcggtttgacaacacctacagcttcattcatgccaagaaggtcaatttcactgtggaggtcctgcttccagacaaagcctcagaagagaagatgaaacagctgggggcaggcaccccgaaataacaccttctcctatagcaggcctggccccctcagtgtctccctgtcaatttctaccccttgtagcagtcattttcgcacaaccctgaagcccaaagaaactgggctggaggacagacctcaggagctttcatttcagttaggcagaggaagagcgactgcagtgggtctccgtgtctatcaaatacctaaggagtccccaggagctggctggccatcgtgataggatctgtctgtcctgtaaactgtgccaacttcacctgtccagggacagcgaagctgggggtggcggggggcatgtaccacagggtggcagcagggaaaaaaattagaaaagggtgaaagattgggacttaacacttcagggaagtcagctgccggggagaaacttgctcctaaatgaacacataagtttagatcgcaatgaggagtagcagggtagctggttgctagagttacggtggggatcagaaactcttccaaacattttagcactgaggctggggtagcttttggcttttcccaggtctcaggaggtggcctgagtcagcacacatcttcccactcggtagacaggctggcctctccctcactttgagactttggcaactcctgggccacacggcctgcctctttgattactaatgattgtcagtgactcagagcttcctgggacttcgggtacccacccgctgttctccatgcaaacaaagcgccagggaaatgacccacagggatcgcagctgcagggagggccagggaggttgggggtgggagtgaatgctaaaagcagatcgtccagtgcccttttcagtgctaccggcctctcaccaagcagtcctccatgtgagcaaccccgagacaaaaatgctaagtgggatcaagagagcagcactcggagagggtgtttgccagtctgagtgtcccgcggtgcccgccaacccgcttcctgactgacctgagcaaggtcttactaagcagtcccatctctgtgggaggcatgcaacgcgtgcagggagttcaggtgccggtcggcgtagccaggcctggaggccccccaggcaggaggccgcccaaaggcggggccggcgtctcgcagactaggggctgggggcggccacagacggcctcgaaaccacagcccttaccccaatcccacgagccccgccaacgaaccacaggtgctgggctttagagaacatgggaaggcggccccagacctggcgggaacgcctttccctcagagccaggccccggccccgtctgggaagctcatcttgcgaagctgagggagctcagggcaaaggccaggctagcgcggaccggaaggggccgaggctgcacgggcctctgccagaacgctcaggacatcccggcctgggtttacaacgctgttaggaaaattaaccaatgaataaagcaacgttcagtgcgca

SEQ ID NO: 267 - protein, 403 aa, human organism
MSGRVGDLSPRQKEALAKFRENVQDVLPALPNPDDYFLLRWLRARSFDLQKSEAMLRKHVEFRKQKDIDNIISWQPPEVIQQYLSGGMCGYDLDGCPVWYDIIGPLDAKGLLFSASKQDLLRTKMRECELLLQECAHQTTKLGRKVETITIIYDCEGLGLKHLWKPAVEAYGEFLCMFEENYPETLKRLFVVKAPKLFPVAYNLIKPFLSEDTRKKIMVLGANWKEVLLKHISPDQVPVEYGGTMTDPDGNPKCKSKINYGGDIPRKYYVRDQVKQQYEHSVQISRGSSHQVEYEILFPGCVLRWQFMSDGADVGFGIFLKTKMGERQRAGEMTEVLPNQRYNSHLVPEDGTLTCSDPGIYVLRFDNTYSFIHAKKVNFTVEVLLPDKASEEKMKQLGAGTPK

SEQ ID NO: 268 - DNA, 1464 bp, human organism
gtggggacagccgagccgcgccgggcccctggacggcgtcgccaaggagctgggatcgcacttgctgcagactttggatggatttgtttttgtggtagcatctgatggcaaaatcatgtatatatccgagaccgcttctgtccatttaggcttatcccaggtggagctcacgggcaacagtatttatgaatacatccatccttctgaccacgatgagatgaccgctgtcctcacggcccaccagccgctgcaccaccacctgctccaaggtatgagatagagaggtcgttctttcttcgaatgaaatgtgtcttggcgaaaaggaacgcgggcctgacctgcagcggatacaaggtcatccactgcagtggctacttgaagatcaggcagtatatgctggacatgtccctgtacgactcctgctaccagattgtggggctggtggccgtgggccagtcgctgccacccagtgccatcaccgagatcaagctgtacagtaacatgttcatgttcagggccagccttgacctgaagctgatattcctggattccagggtgaccgaggtgacggggtacgagccgcaggacctgatcgagaagaccctataccatcacgtgcacggctgcgacgtgttccacctccgctacgcacaccacctcctgttggtgaagggccaggtcaccaccaagtactaccggctgctgtccaagcggggcggctgggtgtgggtgcagagctacgccaccgtggtgcacaacagccgctcgtcccggccccactgcatcgtgagtgtcaattatgtactcacggagattgaatacaaggaacttcagctgtccctggagcaggtgtccactgccaagtcccaggactcctggaggaccgccttgtctacctcacaagaaactaggaaattagtgaaacccaaaaataccaagatgaagacaaagctgagaacaaacccttaccccccacagcaatacagctcgttccaaatggacaaactggaatgcggccagctcggaaactggagagccagtccccctgcaagcgctgctgctcctccagaactgcagccccactcagaaagcagtgaccttctgtacacgccatcctacagcctgcccttctcctaccattacggacacttccctctggactctcacgtcttcagcagcaaaaagccaatgttgccggccaagttcgggcagccccaaggatccccttgtgaggtggcacgctttttcctgagcacactgccagccagcggtgaatgccagtggcattatgccaaccccctagtgcctagcagctcgtctccagctaaaaatcctccagagccaccggcgaacactgctaggcacagcctggtgccaagctacgaaggcaagcagatgtcctctgcggagataccgccagctccccaggacgcagactgactcctgtttgctcgctggaccaac

SEQ ID NO: 269 - protein, 667 aa, human organism; identical to SEQ ID NO: 110

SEQ ID NO: 270 - DNA, 1192 bp, human organism
  misc_feature (1122)..(1122): n is a, c, g, or t
ggcacgaggagaagatgtggcttgctcatgcttgacttctgccatggttgtgaggcctccccagccatgtggaactgttttcaggtgctggttccatggctcttcctgagccgaaaataaggaaactccatagaccttgtccactggaactcgttcccatctaccctccactctatccagggtgatggatctctgcagtaagtggaagagttcttcatggcccccaaggttatatccatctagaacttcagcacgtaatttcatctggaaatagtgcctttgtggatataagttaggtaaaactgaagatgagatcatactggattaggatgggatctaaatccaatgaaaatgtcttcataaaaaacaggaaagaacccatagaaacacaaggaagaaggtcatgtgaagatggaggcagagattggagggatgcagccaccggcccaggaatgccagcagccacccagaagctggaaggaaatgagggattctctcctagaacctttagagagracatggtcctgtgaacagcttgattttggacttgcccatagcttgtatactcttactttggatacaattttatccaaacttggctaaacagtttctcagcctatggaaaatttaaaatggagaagattcaactcgattcttacagattcaaagcaagaaaatgatgggaacataggaggagaccaagaaagcctataaaaagcaaaaatatgaagtgaacattgtggtagctttaagatgtttagtgtagctgcaggcaccctatacacatgaaaacccccaaggggaatccccatatcacagtgtagtgtgatatttgacattygtgatcatytagagatgtacagaaaaggtgaatctgtgttctgtatattctgcctaaggcaaagaaatgtttagctytctttaaaatagttccataattttttytaaaaagctttgcttgaaaactgtaagcttcccatatctggagcatttcactttaaatatttggataaatatgttatcttcttacttggacatttcatgtgtttagggattgtyttytaaattcttcctaattcatatagctgctaacacttcccgcagagctaaaccattacagantatgaaataaagaccctattgatttgaacttaaaaaaaaaaamamaaaaaaaaaaaaaaaaaaaaaatga

SEQ ID NO: 271 - DNA, 1365 bp, human organism
atggaatcaatctctatgatgggaagccctaagagccttagtgaaacttgtttacctaatggcataaatggtatcaaagatgcaaggaaggtcactgtaggtgtgattggaagtggagattttgccaaatccttgaccattcgacttattagatgcggctatcatgtggtcataggaagtagaaatcctaagtttgcttctgaattttttcctcatgtggtagatgtcactcatcatgaagatgctctcacaaaaacaaatataatatttgttgctatacacagagaacattatacctccctgtgggacctgagacatctgcttgtgggtaaaatcctgattgatgtgagcaataacatgaggataaaccagtacccagaatccaatgctgaatatttggcttcattattcccagattctttgattgtcaaaggatttaatgttgtctcagcttgggcacttcagttaggacctaaggatgccagccggcaggtttatatatgcagcaacaatattcaagcgcgacaacaggttattgaacttgcccgccagttgaatttcattcccattgacttgggatccttatcatcagccagagagattgaaaatttacccctacgactctttactctctggagagggccagtggtggtagctataagcttggccacattttttttcctttattcctttgtcagagatgtgattcatccatatgctagaaaccaacagagtgacttttacaaaattcctatagagattgtgaataaaaccttacctatagttgccattactttgctctccctagtatacctcgcaggtcttctggcagctgcttatcaactttattacggcaccaagtataggagatttccaccttggttggaaacctggttacagtgtagaaaacagcttggattactaagttttttcttcgctatggtccatgttgcctacagcctctgcttaccgatgagaaggtcagagagatatttgtttctcaacatggcttatcagcaggttcatgcaaatattgaaaactcttggaatgaggaagaagtttggagaattgaaatgtatatctcctttggcataatgagccttggcttactttccctcctggcagtcacttctatcccttcagtgagcaatgctttaaactggagagaattcagttttattcagtctacacttggatatgtcgctctgctcataagtactttccatgttttaatttatggatggaaacgagcttttgaggaagagtactacagattttatacaccaccaaactttgttcttgctcttgttttgccctcaattgtaattctggatcttttgcagctttgcagatacccagactga

SEQ ID NO: 272 - protein, 454 aa, human organism
MESISMMGSPKSLSETCLPNGINGIKDARKVTVGVIGSGDFAKSLTIRLIRCGYHVVIGSRNPKFASEFFPHVVDVTHHEDALTKTNIIFVAIHREHYTSLWDLRHLLVGKILIDVSNNMRINQYPESNAEYLASLFPDSLIVKGFNVVSAWALQLGPKDASRQVYICSNNIQARQQVIELARQLNFIPIDLGSLSSAREIENLPLRLFTLWRGPVVVAISLATFFFLYSFVRDVIHPYARNQQSDFYKIPIEIVNKTLPIVAITLLSLVYLAGLLAAAYQLYYGTKYRRFPPWLETWLQCRKQLGLLSFFFAMVHVAYSLCLPMRRSERYLFLNMAYQQVHANIENSWNEEEVWRIEMYISFGIMSLGLLSLLAVTSIPSVSNALNWREFSFIQSTLGYVALLISTFHVLIYGWKRAFEEEYYRFYTPPNFVLALVLPSIVILDLLQLCRYPD

SEQ ID NO: 273 - DNA, 1933 bp, human organism
ccgccgccttctactccgccgcgggggtcgcagcggctgccgcgccgtcctcgagtttccagcgtgaggaggaggctgagggcggagaggcgcatcgtgttcgaggcggagaccgagggggagccccgcgcgcggcgtcgctcattgctatggacagtgctatcaccctgtggcagttccttcttcagctcctgcagaagcctcagaacaagcacatgatctgttggacctctaatgatgggcagtttaagcttttgcaggcagaagaggtggctcgtctctgggggattcgcaagaacaagcctaacatgaattatgacaaactcagccgagccctcagatactattatgtaaagaatatcatcaaaaaagtgaatggtcagaagtttgtgtacaagtttgtctcttatccagagattttgaacatggatccaatgacagtgggcaggattgagggtgactgtgaaagtttaaacttcagtgaagtcagcagcagttccaaagatgtggagaatggagggaaagataaaccacctcagcctggtgccaagacctctagccgcaatgactacatacactctggcttatattcttcatttactctcaactctttgaactcctccaatgtaaagcttttcaaattgataaagactgagaatccagccgagaaactggcagagaaaaaatctcctcaggagcccacaccatctgtcatcaaatttgtcacgacaccttccaaaaagccaccagttgaacctgttgctgccaccatttcaattggcccaagtatttctccatcttcagaagaaactatccaagctttggagacattggtttccccaaaactgccttccctggaagccccaacctctgcctctaacgtaatgactgcttttgccaccacaccacccatttcgtccataccccctttgcaggaacctcccagaacaccttcaccaccactgagttctcacccagacatcgacacagacattgattcagtggcttctcagccaatggaacttccagagaatttgtctctggagcctaaagaccaggattcagtcttgctagaaaaggacaaagtaaataattcatcaagatccaagaaacccaaagggttaggactggcacccacccttgtgatcacgagcagtgatccaagcccactgggaatactgagcccatctctccctacagcttctcttacaccagcatttttttcacagacacccatcatactgactccaagccccttgctctccagtatccacttctggagtactctcagtcctgttgctcccctaagtccagccagactgcaaggtgctaacacacttttccagtttccttctgtactgaacagtcatgggccattcactctgtctgggctggatggaccttccacccctggcccattttccccagacctacagaagacataacctatgcacttgtggaatgagagaaccgaggaacgaagaaacagacattcaacatgattgcatttgaagtgagcaattgatagttctacaatgctgataatagactattgtgatttttgccattccccattgaaaacatctttttaggattctctttgaataggactcaagttggactatatgtataaaaatgccttaattggagtctaaactccacctccctctgtcttttccttttctttttctttccttccttccttttcttttctcctttaaaaatattttgagctttgtgctgaagaagtttttggtgggctttagtgactgtgctttgcaaaagcaattaagaacaaagttactccttctggctattgggaccctttggccaggaaaaattatgcttagaatctattatttaaagaagtatttgtgaaatgaaaaaaaaaaaaaaaaaaaaaaaaaaaaaaaaaaaaaaaaaaaaaaaaaaa

SEQ ID NO: 274 - protein, 431 aa, human organism
MDSAITLWQFLLQLLQKPQNKHMICWTSNDGQFKLLQAEEVARLWGIRKNKPNMNYDKLSRALRYYYVKNIIKKVNGQKFVYKFVSYPEILNMDPMTVGRIEGDCESLNFSEVSSSSKDVENGGKDKPPQPGAKTSSRNDYIHSGLYSSFTLNSLNSSNVKLFKLIKTENPAEKLAEKKSPQEPTPSVIKFVTTPSKKPPVEPVAATISIGPSISPSSEETIQALETLVSPKLPSLEAPTSASNVMTAFATTPPISSIPPLQEPPRTPSPPLSSHPDIDTDIDSVASQPMELPENLSLEPKDQDSVLLEKDKVNNSSRSKKPKGLGLAPTLVITSSDPSPLGILSPSLPTASLTPAFFSQTPIILTPSPLLSSIHFWSTLSPVAPLSPARLQGANTLFQFPSVLNSHGPFTLSGLDGPSTPGPFSPDLQKT

SEQ ID NO: 275 - DNA, 3060 bp, human organism
aatcaggaacagatcatatattgaccgagattctgagtatctcttgcaagaaaatgaaccagatggaactttagaccaaaaattattggaagatttacaaaagaaaaaaaatgaccttcggtatattgaaatgcagcatttcagagaaaagctgccttcgtatggaatgcaaaaggaattggtaaatttaattgataaccatcaggtaacagtaataagtggtgaaactggttgtggcaaaaccactcaagttactcagttcattttggataactacattgaaagaggaaaaggatctgcttgcagaatagtttgtactcagccaagaagaattagtgccatttcagttgcggaaagagtagctgcagaaagggcagaatcttgtggcagtggtaatagtactggatatcaaattcgtctccagagtcggttgccaaggaaacagggttctatcttatactgtacaacaggaatcatccttcagtggctccagtcagacccgtatttgtccagtgttagtcatatcgtacttgatgaaatccatgaaagaaatctgcagtcagatgttttaatgactgttgttaaagaccttctcaattttcgatctgacttgaaagtaatattgatgagtgcaacattgaatgcagaaaagttttcagaatattttggtaactgtccaatgatacatatacctggttttacctttccggttgtggaatatcttttggaagatgtaattgaaaaaataaggtatgttccagaacaaaaagaacacagatcccagtttaagaggggtttcatgcaagggcatgtaaatagacaagaaaaagaagaaaaagaagcaatatataaagaacgttggccagattatgtaagggaactgcgaagaaggtattctgcaagtactgtagatgttatagaaatgatggaggatgataaagttgatctgaatttgattgttgccctcatccgatacattgttttggaagaagaggatggtgcgatactggtctttctgccaggctgggacaatatcagcactttacatgatctcttgatgtcacaagtaatgtttaaatcagataaatttttaattatacctttacattcactgatgcctacagttaaccagacacaggtgtttaaaagaacccctcctggtgttcggaaaatagtaattgctaccaacattgcggagactagcattaccatagatgatgtcgtttatgtgatagatggaggaaaaataaaagagacgcattttgatactcagaacaatatcagtacaatgtccgctgagtgggttagtaaagctaatgccaaacagagaaaaggtcgagctggaagagttcaacctggtcattgctatcatctgtataatggtcttagagcaagtcttctagatgactatcaactgccagaaattttgagaactcctttggaagaactttgtttacaaataaagattttaaggctaggtggaattgcttattttctgagtagattaatggacccaccatcaaatgaggcagtgttactctccataagacacctgatggagctgaacgctttggataaacaagaagaattgacacctcttggagtccacttggcacgattacccgttgagccacatattggaaaaatgattctttttggagcactgttctgctgcttagacccagtactcactattgctgctagtctcagtttcaaagatccatttgtcattccactgggaaaagaaaagattgcagatgcaagaagaaaggaattggcaaaggatactagaagtgatcacttaacagttgtgaatgcgtttgagggctgggaagaggctaggcgacgtggtttcagatacgaaaaggactattgctgggaatattttctgtcttcaaacacactgcagatgctgcataacatgaaaggacagtttgctgagcatcttcttggagctggatttgtaagcagtagaaatcctaaagatccagaatctaatataaattcagataatgagaagataattaaagctgtcatctgtgctggtttatatcccaaagttgctaaaattcgactaaatttgggtaaaaaaagaaaaatggtaaaagtttacacaaaaaccgatggcctggttgctgttcatcctaaatctgttaatgtggagcaaacagactttcactacaactggcttatctatcacctaaagatgagaacaagcagtatatacttgtatgactgcacagaggtttccccatactgtctcttgttttttggaggtgacatttccatccagaaggataacgatcaggaaactattgctgtagatgagtggattgtatttcagtctccagcaagaattgcccatcttgttaaggaattaagaaaggaactagatattcttctgcaagagaagattgaaagtcctcatcctgtagactggaatgacactaaatccagagactgtgcagtactgtcagctattatagacttgatcaaaacacaggaaaaggcaactcccaggaactttccgccacgattccaggatggatattacagctgacagcttttcaggggtggtctgaaaagccagtttgacagccattcttcatcattgtttaaattttggctggatgccaaaccctgggacatgaacaattttcatgtgtaaggtagaagccttcagtaggtagtaaagacttaatgtgcatgacttgatgttatatgtagagatatatatatatatatatataccataaaagcaatatgttctctgatcatatactctgctgtggtcatgcccactctttgggagtatattccctttatatatattgagtattgtaccacttgagaaattcctttgttctgttatacaaaattaatctttctgctcataatgattgatgataccaccagtaaaaataggatgtttaccccaaaacaagtgtcaattaagaatttgaacacaaccacattttttaaaatgaaacttctatcggaagtaaattaatttgttgtaataaagtccagtatttaataaaatgtacaatgttaaatctc

SEQ ID NO: 276 - protein, 852 aa, human organism
IRNRSYIDRDSEYLLQENEPDGTLDQKLLEDLQKKKNDLRYIEMQHFREKLPSYGMQKELVNLIDNHQVTVISGETGCGKTTQVTQFILDNYIERGKGSACRIVCTQPRRISAISVAERVAAERAESCGSGNSTGYQIRLQSRLPRKQGSILYCTTGIILQWLQSDPYLSSVSHIVLDEIHERNLQSDVLMTVVKDLLNFRSDLKVILMSATLNAEKFSEYFGNCPMIHIPGFTFPVVEYLLEDVIEKIRYVPEQKEHRSQFKRGFMQGHVNRQEKEEKEAIYKERWPDYVRELRRRYSASTVDVIEMMEDDKVDLNLIVALIRYIVLEEEDGAILVFLPGWDNISTLHDLLMSQVMFKSDKFLIIPLHSLMPTVNQTQVFKRTPPGVRKIVIATNIAETSITIDDVVYVIDGGKIKETHFDTQNNISTMSAEWVSKANAKQRKGRAGRVQPGHCYHLYNGLRASLLDDYQLPEILRTPLEELCLQIKILRLGGIAYFLSRLMDPPSNEAVLLSIRHLMELNALDKQEELTPLGVHLARLPVEPHIGKMILFGALFCCLDPVLTIAASLSFKDPFVIPLGKEKIADARRKELAKDTRSDHLTVVNAFEGWEEARRRGFRYEKDYCWEYFLSSNTLQMLHNMKGQFAEHLLGAGFVSSRNPKDPESNINSDNEKIIKAVICAGLYPKVAKIRLNLGKKRKMVKVYTKTDGLVAVHPKSVNVEQTDFHYNWLIYHLKMRTSSIYLYDCTEVSPYCLLFFGGDISIQKDNDQETIAVDEWIVFQSPARIAHLVKELRKELDILLQEKIESPHPVDWNDTKSRDCAVLSAIIDLIKTQEKATPRNFPPRFQDGYYS

SEQ ID NO: 277 - DNA, 1671 bp, human organism
gattttatcctggaacattacagtgaagatggctatttatatgaagatgaaattgcagatcttatggatctgagacaagcttgtcggacgcctagccgggatgaggccggggtggaactgctgatgacatacttcatccagctgggctttgtcgagagtcgattcttcccgcccacacggcagatgggactcctgttcacctggtatgactctctcaccggggttccggtcagccagcagaacctgctgctggagaaggccagtgtcctgttcaacactggggccctctacacccagattgggacccggtgtgatcggcagacgcaggctgggctggagagtgccatagatgcctttcagagagccgcaggggttttaaattacctgaaagacacatttacccatactccaagttacgacatgagccctgccatgctcagcgtgctcgtcaaaatgatgcttgcacaagcccaagaaagcgtgtttgagaaaatcagccttcctgggatccggaatgaattcttcatgctggtgaaggtggctcaggaggctgctaaggtgggagaggtctaccaacagctacacgcagccatgagccaggcgccggtgaaagagaacatcccctactcctgggccagcttagcctgcgtgaaggcccaccactacgcggccctggcccactacttcactgccatcctcctcatcgaccaccaggtgaagccaggcacggatctggaccaccaggagaagtgcctgtcccagctctacgaccacatgccagaggggctgacacccttggccacactgaagaatgatcagcagcgccgacagctggggaagtcccacttgcgcagagccatggctcatcacgaggagtcggtgcgggaggccagcctctgcaagaagctgcggagcattgaggtgctacagaaggtgctgtgtgccgcacaggaacgctcccggctcacgtacgcccagcaccaggaggaggatgacctgctgaacctgatcgacgcccccagtgttgttgctaaaactgagcaagaggttgacattatattgccccagttctccaagctgacagtcacggacttcttccagaagctgggccccttatctgtgttttcggctaacaagcggtggacgcctcctcgaagcatccgcttcactgcagaagaaggggacttggggttcaccttgagagggaacgcccccgttcaggttcacttcctggatccttactgctctgcctcggtggcaggagcccgggaaggagattatattgtctccattcagcttgtggattgtaagtggctgacgctgagtgaggttatgaagctgctgaagagctttggcgaggacgagatcgagatgaaagtcgtgagcctcctggactccacatcatccatgcataataagagtgccacatactccgtgggaatgcagaaaacgtactccatgatctgcttagccattgatgatgacgacaaaactgataaaaccaagaaaatctccaagaagctttccttcctgagttggggcaccaacaagaacagacagaagtcagccagcaccttgtgcctcccatcggtcggggctgcacggcctcaggtcaagaagaagctgccctcccctttcagccttctcaactcagacagttcttggtactaa

SEQ ID NO: 278 - protein, 556 aa, human organism
DFILEHYSEDGYLYEDEIADLMDLRQACRTPSRDEAGVELLMTYFIQLGFVESRFFPPTRQMGLLFTWYDSLTGVPVSQQNLLLEKASVLFNTGALYTQIGTRCDRQTQAGLESAIDAFQRAAGVLNYLKDTFTHTPSYDMSPAMLSVLVKMMLAQAQESVFEKISLPGIRNEFFMLVKVAQEAAKVGEVYQQLHAAMSQAPVKENIPYSWASLACVKAHHYAALAHYFTAILLIDHQVKPGTDLDHQEKCLSQLYDHMPEGLTPLATLKNDQQRRQLGKSHLRRAMAHHEESVREASLCKKLRSIEVLQKVLCAAQERSRLTYAQHQEEDDLLNLIDAPSVVAKTEQEVDIILPQFSKLTVTDFFQKLGPLSVFSANKRWTPPRSIRFTAEEGDLGFTLRGNAPVQVHFLDPYCSASVAGAREGDYIVSIQLVDCKWLTLSEVMKLLKSFGEDEIEMKVVSLLDSTSSMHNKSATYSVGMQKTYSMICLAIDDDDKTDKTKKISKKLSFLSWGTNKNRQKSASTLCLPSVGAARPQVKKKLPSPFSLLNSDSSWY

SEQ ID NO: 279 - DNA, 2674 bp, human organism
gaattcggcacgagccttgttggaggttctggggcgcagaaccgctactgctgcttcggtctctccttgggaaaaaataaaatttgaaccttttggagctgtgtgctaaatcttcagtgggacaatgggttcagacaaaagagtgagtagaacagagcgtagtggaagatacggttccatcatagacagggatgaccgtgatgagcgtgaatcccgaagcaggcggagggactcagattacaaaagatctagtgatgatcggaggggtgatagatatgatgactaccgagactatgacagtccagagagagagcgtgaaagaaggaacagtgaccgatccgaagatggctaccattcagatggtgactatggtgagcacgactataggcatgacatcagtgacgagagggagagcaagaccatcatgctgcgcggccttcccatcaccatcacagagagcgatattcgagaaatgatggagtccttcgaaggccctcagcctgcggatgtgaggctgatgaagaggaaaacaggtgagagcttgcttagttcctgatattattgttctcttccccattcccacctcagtccctaaagaacatcctgattcccccagtcttcaagcacatgaattcagaatgaaaggtttgccatggctaaggaatgtgactctttgaaaaccatgttagcatctgaggaacttttttaaactttgttttagggacttttttttccttaggtaagtaatgatttataaactcctttttttttttgactatagtcggttgcatggttactttaagcgtggaatcaaatggagtggcatttagttcaggcggcttgttccttgccatggcaaagtatcaagaagatccccaagtcaagtcacatttgtaaagctgcttcccaattggctttgtcacgcagtgttgaagcagtgggagagagattcacctgttataaaggaactgactaacacaagtatcccgtctatatctgaatgctgtctctaggtgtaagccgtggtttcgccttcgtggagttttatcacttgcaagatgctaccagctggatggaagccaatcaggttgcttcactcaccaagtctagatattcatgaaaatggaacaagtctgtacaattttaaaaaaaggttgaaggagtggtttgttccaaaggagtgacttttttttaaaaaaaaagctttgtatatattaaaattgatgttactagaataagtacagtaccaaggacttcattatagaatttgttctgcctttaaacatggctacctacctggcagggctttgttaactactgaatacctgtctggtaatcactaaaacatctttatgtttcccttttttctagtttgttatattcctattatgtccattgagagtaagcttagtatatcaaactctccatttgacagtgaagagaacatagtgaaagtctgtggcggcatttttataagtaattccttatttctgcctgaagaccacaaagcctcctggaggcgtaactgctcagaccggtcttcagggaatatttaaggacttagtggaatttatgaacaataagtctgatgagattagcctgggagtggtgtcctgcagctgtctaatctagagtggcattaacattctaatctccttgagaatgccttttatagtctgttcaaagcaagtcattgatggttcttcgaggtagtgttaactgaagtgttcttcagtttgtcaagataatgttcagtgcttggcacttaaataacattttttgcaagaactccaaggcacattattgaatgcctttaaccaagtgcattctgggaagtttgcttgactcattatcttgcttttctgcagcattctgtgatttgagtcatccatgaatccatgaataaaagttacattctttgattggtaatattgccatttataacaagactcactaatgagggtatcactttgactgactgatttgttaaagtttttaagcctctcattttcctaacccagaaatcacagcctgattttattaaaagtagagcttcattcatttcataccatagataccatcctagtaaatccagaacatatacaaggttcatgtgagtctgctttcttgacatgatagcattgtttgatgcagtggatatgtcagaatgactaacctaggagtttgaaactcctaagaaactaaaacctgtaagacatttaaaagtctccacaattttaatgtatacaaagctatgttactgtgtaacacattacagttcaaattcactccagaaataaaaggccagtaggattagggactcactggtagtttggagtctcccagcacacatccctcctagtgggatgatctattcacatatctcccagcttttttatttttgcttctgtatatcacagtgagtggatggcccttcagctttttctctcctggccagacatgcagtcttgcctttagatatcgcagagacaaaattcacagcatgtcttaaatcttccaggatttgcaagaaccaaattgctcaacagtatgtatgtttagaggggttagactcctttttaaaatctggatatctaaccacctacttaaatctgtttgatagtgtcaaaccacccccacccttgatcctcccacccccaaaaaaaaaaaaaaa

SEQ ID NO: 280 - protein, 143 aa, human organism
MGSDKRVSRTERSGRYGSIIDRDDRDERESRSRRRDSDYKRSSDDRRGDRYDDYRDYDSPERERERRNSDRSEDGYHSDGDYGEHDYRHDISDERESKTIMLRGLPITITESDIREMMESFEGPQPADVRLMKRKTGESLLSS

SEQ ID NO: 281 - DNA, 4000 bp, human organism
cggccgcttttttctcaagatggcagattcccactgaggctgagggggccgagctcgcgcgccgcgttcccttctccgttgccatgaaccgcggacaccccggccccgatggcccccgtgtacgaaggtatggcctcacatgtgcaagttttctcccctcacacccttcaatcaagtgccttctgtagtgtgaagaaactaaaagtagagccaagttccaactgggacatgactgggtacggctcccacagcaaagtgtacagccagagcaagaacataccaccttctcagccagcctccacaaccgtcagcacctccttgccggtcccaaacccaagcctaccttacgagcagaccatcgtcttcccaggaagcaccgggcacatcgtggtcacctcagcaagcagcacttctgtcaccgggcaagtcctcggcggaccacacaacctaatgcgtcgaagcactgtgagcctccttgatacctaccaaaaatgtggactcaagcgtaagagcgaggagatcgagaacacaagcagcgtgcagatcatcgaggagcatccacccatgattcagaataatgcaagcggggccactgtcgccactgccaccacgtctactgccacctccaaaaacagcggctccaacagcgagggcgactatcagctggtgcagcatgaggtgctgtgctccatgaccaacacctacgaggtcttagagttcttgggccgagggacgtttggacaagtggtcaagtgctggaaacggggcaccaatgagatcgtagccatcaagatcctgaagaaccgcccatcctatgcccgacaaggtcagattgaagtgagcatcctggcccggttgagcacggagagtgccgatgactataacttcgtccgggcctacgaatgcttccagcacaagaaccacacgtgcttggtcttcgagatgttggagcagaacctctatgactttctgaagcaaaacaagtttagccccttgcccctcaaatacattcgcccagttctccagcaggtagccacagccctgatgaaactcaaaagcctaggtcttatccacgctgacctcaaaccagaaaacatcatgctggtggatccatctagacaaccatacagagtcaaggtcatcgactttggttcagccagccacgtctccaaggctgtgtgctccacctacttgcagtccagatattacagggcccctgagatcatccttggtttaccattttgtgaggcaattgacatgtggtccctgggctgtgttattgcagaattgttcctgggttggccgttatatccaggagcttcggagtatgatcagattcggtatatttcacaaacacagggtttgcctgctgaatatttattaagcgccgggacaaagacaactaggtttttcaaccgtgacacggactcaccatatcctttgtggagactgaagacaccagatgaccatgaagcagagacagggattaagtcaaaagaagcaagaaagtacattttcaactgtttagatgatatggcccaggtgaacatgacgacagatttggaagggagcgacatgttggtagaaaaggctgaccggcgggagttcattgacctgttgaagaagatgctgaccattgatgctgacaagagaatcactccaatcgaaaccctgaaccatccctttgtcaccatgacacacttactcgattttccccacagcacacacgtcaaatcatgtttccagaacatggagatctgcaagcgtcgggtgaatatgtatgacacggtgaaccagagcaaaacccctttcatcacgcacgtggcccccagcacgtccaccaacctgaccatgacctttaacaaccagctgaccactgtccacaaccaggctccctcctctaccagtgccactatttccttagccaatcccgaagtctccatactaaactacccatctacactctaccagccctcagcggcatccatggctgcagtggcccagcggagcatgcccctgcagacaggaacagcccagatttgtgcccggcctgacccgttccagcaagctctcatcgtgtgtccccccggcttccaaggcttgcaggcctctccctctaagcacgctggctactcggtgcgaatggaaaatgcagttcccatcgtcactcaagccccaggagctcagcctcttcagatccaaccaggtctgcttgcccagcaggcttggccaagtgggacccagcagatcctgcttcccccagcatggcagcaactgactggagtggccacccacacatcagtgcagcatgccaccgtgattcccgagaccatggcaggcacccagcagctggcggactggagaaatacgcatgctcacggaagccattataatcccatcatgcagcagcctgcactattgaccggtcatgtgacccttccagcagcacagcccttaaatgtgggtgtggcccacgtgatgcggcagcagccaaccagcaccacctcctcccggaagagtaagcagcaccagtcatctgtgagaaatgtctccacctgtgaggtgtcctcctctcaggccatcagctccccacagcgatccaagcgtgtcaaggagaacacacctccccgctgtgccatggtgcacagtagcccggcctgcagcacctcggtcacctgtgggtggggcgacgtggcctccagcaccacccgggaacggcagcggcagacaattgtcattcccgacactcccagccccacggtcagcgtcatcaccatcagcagtgacacggacgaggaggaggaacagaaacacgcccccaccagcactgtctccaagcaaagaaaaaacgtcatcagctgtgtcacagtccacgactccccctactccgactcctccagcaacaccagcccctactccgtgcagcagcgtgctgggcacaacaatgccaatgcctttgacaccaaggggagcctggagaatcactgcacggggaacccccgaaccatcatcgtgccacccctgaaaacccaggccagcgaagtattggtggagtgtgatagcctggtgccagtcaacaccagtcaccactcgtcctcctacaagtccaagtcctccagcaacgtgacctccaccagcggtcactcttcagggagctcatctggagccatcacctaccggcagcagcggccgggcccccacttccagcagcagcagccactcaatctcagccaggctcagcagcacatcaccacggaccgcactgggagccaccgaaggcagcaggcctacatcactcccaccatggcccaggctccgtactccttcccgcacaacagccccagccacggcactgtgcacccgcatctggctgcagccgctgccgctgcccacctccccacccagccccacctctacacctacactgcgccggcggccctgggctccaccggcaccgtggcccacctggtggcctcgcaaggctctgcgcgccacaccgtgcagcacactgcctacccagccagcatcgtccaccaggtccccgtgagcatgggcccccgggtcctgccctcgcccaccatccacccgagtcagtatccagcccaatttgcccaccagacctacatcagcgcctcgccagcctccaccgtctacactggatacccactgagccccgccaaggtcaaccagtacccttacatataaacactggaggggagggagggagggagggagggagagaatggcccgagggaggagggagagaaggagggaggcgctcctgggaccgtgggcgctggccttttatactgaagatgccgcacacaaacaatgcaaacggggcaggggcggggggggggggggcagagggcagggggacgggtcgggacaccagtgaaacttgaaccgggaagtgggaggacgtagagcagagaagagaacatttttaaaaggaagggattaaagagggtgggaaatctatggtttttattttaaaaaa

SEQ ID NO: 282 - protein, 1198 aa, human organism
MAPVYEGMASHVQVFSPHTLQSSAFCSVKKLKVEPSSNWDMTGYGSHSKVYSQSKNIPPSQPASTTVSTSLPVPNPSLPYEQTIVFPGSTGHIVVTSASSTSVTGQVLGGPHNLMRRSTVSLLDTYQKCGLKRKSEEIENTSSVQIIEEHPPMIQNNASGATVATATTSTATSKNSGSNSEGDYQLVQHEVLCSMTNTYEVLEFLGRGTFGQVVKCWKRGTNEIVAIKILKNRPSYARQGQIEVSILARLSTESADDYNFVRAYECFQHKNHTCLVFEMLEQNLYDFLKQNKFSPLPLKYIRPVLQQVATALMKLKSLGLIHADLKPENIMLVDPSRQPYRVKVIDFGSASHVSKAVCSTYLQSRYYRAPEIILGLPFCEAIDMWSLGCVIAELFLGWPLYPGASEYDQIRYISQTQGLPAEYLLSAGTKTTRFFNRDTDSPYPLWRLKTPDDHEAETGIKSKEARKYIFNCLDDMAQVNMTTDLEGSDMLVEKADRREFIDLLKKMLTIDADKRITPIETLNHPFVTMTHLLDFPHSTHVKSCFQNMEICKRRVNMYDTVNQSKTPFITHVAPSTSTNLTMTFNNQLTTVHNQAPSSTSATISLANPEVSILNYPSTLYQPSAASMAAVAQRSMPLQTGTAQICARPDPFQQALIVCPPGFQGLQASPSKHAGYSVRMENAVPIVTQAPGAQPLQIQPGLLAQQAWPSGTQQILLPPAWQQLTGVATHTSVQHATVIPETMAGTQQLADWRNTHAHGSHYNPIMQQPALLTGHVTLPAAQPLNVGVAHVMRQQPTSTTSSRKSKQHQSSVRNVSTCEVSSSQAISSPQRSKRVKENTPPRCAMVHSSPACSTSVTCGWGDVASSTTRERQRQTIVIPDTPSPTVSVITISSDTDEEEEQKHAPTSTVSKQRKNVISCVTVHDSPYSDSSSNTSPYSVQQRAGHNNANAFDTKGSLENHCTGNPRTIIVPPLKTQASEVLVECDSLVPVNTSHHSSSYKSKSSSNVTSTSGHSSGSSSGAITYRQQRPGPHFQQQQPLNLSQAQQHITTDRTGSHRRQQAYITPTMAQAPYSFPHNSPSHGTVHPHLAAAAAAAHLPTQPHLYTYTAPAALGSTGTVAHLVASQGSARHTVQHTAYPASIVHQVPVSMGPRVLPSPTIHPSQYPAQFAHQTYISASPASTVYTGYPLSPAKVNQYPYI

SEQ ID NO: 283 - DNA, 1464 bp, human organism
agtcacagccaggtaaccctggagtgaagcggtttagttagaagggagcagataaactcgtcactctagtagctttaaccctcaccctgaggcaccttagcaatcagccattgcctgcaagcctccaaagcttgtctttgcctaatatggagcccaaagaagccactgggaaagaaaacatggtcaccaagaaaaagaatctggccttcttgaggtctagactctatatgctggagagaaggaagactgacactgtggttgagagcagtgtttctggggaccactctggcaccttgaggaggagccaatctgacaggaccgaatacaaccagaaattacaagaaaagatgactccacagggtgagtgttctgtagctgagaccttaaccccagaggaagagcatcatatgaagaggatgatggcaaagcgggaaaagatcattaaggagctgatacagacagaaaaggattatctcaatgatctagagctgtgtgttagggaagtggttcagcccctgagaaataaaaagactgataggctggatgtggatagcttgtttagcaacattgagtccgtgcatcagatatcagccaagctgctgtcattgttggaagaggccacaacagacgtggaaccggccatgcaagtaattggagaagtattcttgcagattaaagggccactggaagatatttataaaatctactgctatcaccatgatgaagcacatagtatactggagtcctatgaaaaggaagaagagctgaaggaacatttgagccactgtatccagtccttaaagtaaggccttttcaaatgatgattcccatctcctctcagttgcctagcagggaacattttaaatggatgtagatgaaaggtctcacataaatcctatgttttatgagacttgctgggagctctgctttgcattccctttataaaaagctgacatgccagaagccctgattgactttttttccccctgcgagaatgactaaaaataacatggaagaagatttagagctctgcagcgattgaaaaatgcaatatcaaaatataaaatgtggaagaaaagcctcttcttaaagctattgtaacttgcctggccccacgtagttcaaggattatgtgagataacacgtggccccatgaccactggagcacatgggttaatggagttaggggaatggcctacaactctgcatggccgtcttctttccccaaactcactgtggggagatgggtgaagacaagtcaggccttgttaaagttagtttcagaacaattactcatgccttcctttctcatccctaaaacattggtgggggagctacacaatgtactttttcttttctagaggaagtatctattcactgtgaaaatctgaaaaatataacaaagtatgtgtaagataaaaaccccttgctatttcaaaaaaaaaaaaaaaaaaaaaaaaaaaa

SEQ ID NO: 284 - protein, 219 aa, human organism; identical to SEQ ID NO: 263

SEQ ID NO: 285 - DNA, 3004 bp, human organism; identical to SEQ ID NO: 157

SEQ ID NO: 286 - protein, 690 aa, human organism
MFCTKLKDLKITGECPFSLLAPGQVPNESSEEAAGSSESCKATVPICQDIPEKNIQESLPQRKTSRSRVYLHTLAESICKLIFPEFERLNVALQRTLAKHKIKESRKSLEREDFEKTIAEQAVAAGVPVEVIKESLGEEVFKICYEEDENILGVVGGTLKDFLNSFSTLLKQSSHCQEAGKRGRLEDASILCLDKEDDFLHVYYFFPKRTTSLILPGIIKAAAHVLYETEVEVSLMPPCFHNDCSEFVNQPYLLYSVHMKSTKPSLSPSKPQSSLVIPTSLFCKTFPFHFMFDKDMTILQFGNGIRRLMNRRDFQGKPNFEEYFEILTPKINQTFSGIMTMLNMQFVVRVRRWDNSVKKSSRVMDLKGQMIYIVESSAILFLGSPCVDRLEDFTGRGLYLSDIPIHNALRDVVLIGEQARAQDGLKKRLGKLKATLEQAHQALEEEKKKTVDLLCSIFPCEVAQQLWQGQVVQAKKFSNVTMLFSDIVGFTAICSQCSPLQVITMLNALYTRFDQQCGELDVYKVETIGDAYCVAGGLHKESDTHAVQIALMALKMMELSDEVMSPHGEPIKMRIGLHSGSVFAGVVGVKMPRYCLFGNNVTLANKFESCSVPRKINVSPTTYRLLKDCPGFVFTPRSREELPPNFPSEIPGICHFLDAYQQGTNSKPCFQKKDVEDGNANFLGKASGID

SEQ ID NO: 287 - DNA, 7193 bp, human organism
agaataagggcagggaccgcggctcctatctcttggtgatccccttccccattccgcccccgcctcaacgcccagcacagtgccctgcacacagtagtcgctcaataaatgttcgtggatgatgatgatgatgatgatgaaaaaaatgcagcatcaacggcagcagcaagcggaccacgcgaacgaggcaaactatgcaagaggcaccagacttcctctttctggtgaaggaccaacttctcagccgaatagctccaagcaaactgtcctgtcttggcaagctgcaatcgatgctgctagacaggccaaggctgcccaaactatgagcacctctgcacccccacctgtaggatctctctcccaaagaaaacgtcagcaatacgccaagagcaaaaaacagggtaactcgtccaacagccgacctgcccgcgcccttttctgtttatcactcaataaccccatccgaagagcctgcattagtatagtggaatggaaaccatttgacatatttatattattggctatttttgccaattgtgtggccttagctatttacatcccattccctgaagatgattctaattcaacaaatcataacttggaaaaagtagaatatgccttcctgattatttttacagtcgagacatttttgaagattatagcgtatggattattgctacatcctaatgcttatgttaggaatggatggaatttactggattttgttatagtaatagtaggattgtttagtgtaattttggaacaattaaccaaagaaacagaaggcgggaaccactcaagcggcaaatctggaggctttgatgtcaaagccctccgtgcctttcgagtgttgcgaccacttcgactagtgtcaggggtgcccagtttacaagttgtcctgaactccattataaaagccatggttcccctccttcacatagcccttttggtattatttgtaatcataatctatgctattataggattggaactttttattggaaaaatgcacaaaacatgtttttttgctgactcagatatcgtagctgaagaggacccagctccatgtgcgttctcagggaatggacgccagtgtactgccaatggcacggaatgtaggagtggctgggttggcccgaacggaggcatcaccaactttgataactttgcctttgccatgcttactgtgtttcagtgcatcaccatggagggctggacagacgtgctctactgggtaaatgatgcgataggatgggaatggccatgggtgtattttgttagtctgatcatccttggctcatttttcgtccttaacctggttcttggtgtccttagtggagaattctcaaaggaaagagagaaggcaaaagcacggggagatttccagaagctccgggagaagcagcagctggaggaggatctaaagggctacttggattggatcacccaagctgaggacatcgatccggagaatgaggaagaaggaggagaggaaggcaaacgaaatactagcatgcccaccagcgagactgagtctgtgaacacagagaacgtcagcggtgaaggcgagaaccgaggctgctgtggaagtctctggtgctggtggagacggagaggcgcggccaaggcggggccctctgggtgtcggcggtggggtcaagccatctcaaaatccaaactcagccgacgctggcgtcgctggaaccgattcaatcgcagaagatgtagggccgccgtgaagtctgtcacgttttactggctggttatcgtcctggtgtttctgaacaccttaaccatttcctctgagcactacaatcagccagattggttgacacagattcaagatattgccaacaaagtcctcttggctctgttcacctgcgagatgctggtaaaaatgtacagcttgggcctccaagcatatttcgtctctcttttcaaccggtttgattgcttcgtggtgtgtggtggaatcactgagacgatcctggtggaactggaaatcatgtctcccctggggatctctgtgtttcggtgtgtgcgcctcttaagaatcttcaaagtgaccaggcactggacttccctgagcaacttagtggcatccttattaaactccatgaagtccatcgcttcgctgttgcttctgctttttctcttcattatcatcttttccttgcttgggatgcagctgtttggcggcaagtttaattttgatgaaacgcaaaccaagcggagcacctttgacaatttccctcaagcacttctcacagtgttccagatcctgacaggcgaagactggaatgctgtgatgtacgatggcatcatggcttacgggggcccatcctcttcaggaatgatcgtctgcatctacttcatcatcctcttcatttgtggtaactatattctactgaatgtcttcttggccatcgctgtagacaatttggctgatgctgaaagtctgaacactgctcagaaagaagaagcggaagaaaaggagaggaaaaagattgccagaaaagagagcctagaaaataaaaagaacaacaaaccagaagtcaaccagatagccaacagtgacaacaaggttacaattgatgactatagagaagaggatgaagacaaggacccctatccgccttgcgatgtgccagtaggggaagaggaagaggaagaggaggaggatgaacctgaggttcctgccggaccccgtcctcgaaggatctcggagttgaacatgaaggaaaaaattgcccccatccctgaagggagcgctttcttcattcttagcaagaccaacccgatccgcgtaggctgccacaagctcatcaaccaccacatcttcaccaacctcatccttgtcttcatcatgctgagcagcgctgccctggccgcagaggaccccatccgcagccactccttccggaacacgatactgggttactttgactatgccttcacagccatctttactgttgagatcctgttgaagatgacaacttttggagctttcctccacaaaggggccttctgcaggaactacttcaatttgctggatatgctggtggttggggtgtctctggtgtcatttgggattcaatccagtgccatctccgttgtgaagattctgagggtcttaagggtcctgcgtcccctcagggccatcaacagagcaaaaggacttaagcacgtggtccagtgcgtcttcgtggccatccggaccatcggcaacatcatgatcgtcactaccctcctgcagttcatgtttgcctgtatcggggtccagttgttcaaggggaagttctatcgctgtacggatgaagccaaaagtaaccctgaagaatgcaggggacttttcatcctctacaaggatggggatgttgacagtcctgtggtccgtgaacggatctggcaaaacagtgatttcaacttcgacaacgtcctctctgctatgatggcgctcttcacagtctccacgtttgagggctggcctgcgttgctgtataaagccatcgactcgaatggagagaacatcggcccaatctacaaccaccgcgtggagatctccatcttcttcatcatctacatcatcattgtagctttcttcatgatgaacatctttgtgggctttgtcatcgttacatttcaggaacaaggagaaaaagagtataagaactgtgagctggacaaaaatcagcgtcagtgtgttgaatacgccttgaaagcacgtcccttgcggagatacatccccaaaaacccctaccagtacaagttctggtacgtggtgaactcttcgcctttcgaatacatgatgtttgtcctcatcatgctcaacacactctgcttggccatgcagcactacgagcagtccaagatgttcaatgatgccatggacattctgaacatggtcttcaccggggtgttcaccgtcgagatggttttgaaagtcatcgcatttaagcctaaggggtattttagtgacgcctggaacacgtttgactccctcatcgtaatcggcagcattatagacgtggccctcagcgaagcggacccaactgaaagtgaaaatgtccctgtcccaactgctacacctgggaactctgaagagagcaatagaatctccatcacctttttccgtcttttccgagtgatgcgattggtgaagcttctcagcaggggggaaggcatccggacattgctgtggacttttattaagtcctttcaggcgctcccgtatgtggccctcctcatagccatgctgttcttcatctatgcggtcattggcatgcagatgtttgggaaagttgccatgagagataacaaccagatcaataggaacaataacttccagacgtttccccaggcggtgctgctgctcttcaggtgtgcaacaggtgaggcctggcaggagatcatgctggcctgtctcccagggaagctctgtgaccctgagtcagattacaaccccggggaggagtatacatgtgggagcaactttgccattgtctatttcatcagtttttacatgctctgtgcatttctgatcatcaatctgtttgtggctgtcatcatggataatttcgactatctgacccgggactggtctattttggggcctcaccatttagatgaattcaaaagaatatggtcagaatatgaccctgaggcaaagggaaggataaaacaccttgatgtggtcactctgcttcgacgcatccagcctcccctggggtttgggaagttatgtccacacagggtagcgtgcaagagattagttgccatgaacatgcctctcaacagtgacgggacagtcatgtttaatgcaaccctgtttgctttggttcgaacggctcttaagatcaagaccgaagggaacctggagcaagctaatgaagaacttcgggctgtgataaagaaaatttggaagaaaaccagcatgaaattacttgaccaagttgtccctccagctggtgatgatgaggtaaccgtggggaagttctatgccactttcctgatacaggactactttaggaaattcaagaaacggaaagaacaaggactggtgggaaagtaccctgcgaagaacaccacaattgccctacaggcgggattaaggacactgcatgacattgggccagaaatccggcgtgctatatcgtgtgatttgcaagatgacgagcctgaggaaacaaaacgagaagaagaagatgatgtgttcaaaagaaatggtgccctgcttggaaaccatgtcaatcatgttaatagtgataggagagattcccttcagcagaccaataccacccaccgtcccctgcatgtccaaaggccttcaattccacctgcaagtgatactgagaaaccgctgtttcctccagcaggaaattcggtgtgtcataaccatcataaccataattccataggaaagcaagttcccacctcaacaaatgccaatctcaataatgccaatatgtccaaagctgcccatggaaagcggcccagcattgggaaccttgagcatgtgtctgaaaatgggcatcattcttcccacaagcatgaccgggagcctcagagaaggtccagtgtgaaaagaacccgctattatgaaacttacattaggtccgactcaggagatgaacagctcccaactatttgccgggaagacccagagatacatggctatttcagggacccccactgcttgggggagcaggagtatttcagtagtgaggaatgctacgaggatgacagctcgcccacctggagcaggcaaaactatggctactacagcagatacccaggcagaaacatcgactctgagaggccccgaggctaccatcatccccaaggattcttggaggacgatgactcgcccgtttgctatgattcacggagatctccaaggagacgcctactacctcccaccccagcatcccaccggagatcctccttcaactttgagtgcctgcgccggcagagcagccaggaagaggtcccgtcgtctcccatcttcccccatcgcacggccctgcctctgcatctaatgcagcaacagatcatggcagttgccggcctagattcaagtaaagcccagaagtactcaccgagtcactcgacccggtcgtgggccacccctccagcaacccctccctaccgggactggacaccgtgctacacccccctgatccaagtggagcagtcagaggccctggaccaggtgaacggcagcctgccgtccctgcaccgcagctcctggtacacagacgagcccgacatctcctaccggactttcacaccagccagcctgactgtccccagcagcttccggaacaaaaacagcgacaagcagaggagtgcggacagcttggtggaggcagtcctgatatccgaaggcttgggacgctatgcaagggacccaaaatttgtgtcagcaacaaaacacgaaatcgctgatgcctgtgacctcaccatcgacgagatggagagtgcagccagcaccctgcttaatgggaacgtgcgtccccgagccaacggggatgtgggccccctctcacaccggcaggactatgagctacaggactttggtcctggctacagcgacgaagagccagaccctgggagggatgaggaggacctggcggatgaaatgatatgcatcaccaccttgtagcccccagcgaggggcagactggctctggcctcaggtggggcgcaggagagccaggggaaaagtgcctcatagttaggaaagtttaggcactagttgggagtaatattcaattaattagacttttgtataagagatgtcatgcctcaagaaagccataaacctggtaggaacaggtcccaagcggttgagcctggcagagtaccatgcgctcggccccagctgcaggaaacagcaggccccgccctctcacagaggatgggtgaggaggccagacctgccctgccccattgtccagatgggcactgctgtggagtctgcttctcccatgtaccagggcaccaggcccacccaactgaaggcatggcggcggggtgcaggggaaagttaaaggtgatgacgatcatcacacctcgtgtcgttacctcagccatcggtctagcatatcagtcactgggcccaacatatccatttttaaaccctttcccccaaatacactgcgtcctggttcctgtttagctgttctgaaata

SEQ ID NO: 288 - protein, 2181 aa, human organism
MMMMMMMKKMQHQRQQQADHANEANYARGTRLPLSGEGPTSQPNSSKQTVLSWQAAIDAARQAKAAQTMSTSAPPPVGSLSQRKRQQYAKSKKQGNSSNSRPARALFCLSLNNPIRRACISIVEWKPFDIFILLAIFANCVALAIYIPFPEDDSNSTNHNLEKVEYAFLIIFTVETFLKIIAYGLLLHPNAYVRNGWNLLDFVIVIVGLFSVILEQLTKETEGGNHSSGKSGGFDVKALRAFRVLRPLRLVSGVPSLQVVLNSIIKAMVPLLHIALLVLFVIIIYAIIGLELFIGKMHKTCFFADSDIVAEEDPAPCAFSGNGRQCTANGTECRSGWVGPNGGITNFDNFAFAMLTVFQCITMEGWTDVLYWVNDAIGWEWPWVYFVSLIILGSFFVLNLVLGVLSGEFSKEREKAKARGDFQKLREKQQLEEDLKGYLDWITQAEDIDPENEEEGGEEGKRNTSMPTSETESVNTENVSGEGENRGCCGSLWCWWRRRGAAKAGPSGCRRWGQAISKSKLSRRWRRWNRFNRRRCRAAVKSVTFYWLVIVLVFLNTLTISSEHYNQPDWLTQIQDIANKVLLALFTCEMLVKMYSLGLQAYFVSLFNRFDCFVVCGGITETILVELEIMSPLGISVFRCVRLLRIFKVTRHWTSLSNLVASLLNSMKSIASLLLLLFLFIIIFSLLGMQLFGGKFNFDETQTKRSTFDNFPQALLTVFQILTGEDWNAVMYDGIMAYGGPSSSGMIVCIYFIILFICGNYILLNVFLAIAVDNLADAESLNTAQKEEAEEKERKKIARKESLENKKNNKPEVNQIANSDNKVTIDDYREEDEDKDPYPPCDVPVGEEEEEEEEDEPEVPAGPRPRRISELNMKEKIAPIPEGSAFFILSKTNPIRVGCHKLINHHIFTNLILVFIMLSSAALAAEDPIRSHSFRNTILGYFDYAFTAIFTVEILLKMTTFGAFLHKGAFCRNYFNLLDMLVVGVSLVSFGIQSSAISVVKILRVLRVLRPLRAINRAKGLKHVVQCVFVAIRTIGNIMIVTTLLQFMFACIGVQLFKGKFYRCTDEAKSNPEECRGLFILYKDGDVDSPVVRERIWQNSDFNFDNVLSAMMALFTVSTFEGWPALLYKAIDSNGENIGPIYNHRVEISIFFIIYIIIVAFFMMNIFVGFVIVTFQEQGEKEYKNCELDKNQRQCVEYALKARPLRRYIPKNPYQYKFWYVVNSSPFEYMMFVLIMLNTLCLAMQHYEQSKMFNDAMDILNMVFTGVFTVEMVLKVIAFKPKGYFSDAWNTFDSLIVIGSIIDVALSEADPTESENVPVPTATPGNSEESNRISITFFRLFRVMRLVKLLSRGEGIRTLLWTFIKSFQALPYVALLIAMLFFIYAVIGMQMFGKVAMRDNNQINRNNNFQTFPQAVLLLFRCATGEAWQEIMLACLPGKLCDPESDYNPGEEYTCGSNFAIVYFISFYMLCAFLIINLFVAVIMDNFDYLTRDWSILGPHHLDEFKRIWSEYDPEAKGRIKHLDVVTLLRRIQPPLGFGKLCPHRVACKRLVAMNMPLNSDGTVMFNATLFALVRTALKIKTEGNLEQANEELRAVIKKIWKKTSMKLLDQVVPPAGDDEVTVGKFYATFLIQDYFRKFKKRKEQGLVGKYPAKNTTIALQAGLRTLHDIGPEIRRAISCDLQDDEPEETKREEEDDVFKRNGALLGNHVNHVNSDRRDSLQQTNTTHRPLHVQRPSIPPASDTEKPLFPPAGNSVCHNHHNHNSIGKQVPTSTNANLNNANMSKAAHGKRPSIGNLEHVSENGHHSSHKHDREPQRRSSVKRTRYYETYIRSDSGDEQLPTICREDPEIHGYFRDPHCLGEQEYFSSEECYEDDSSPTWSRQNYGYYSRYPGRNIDSERPRGYHHPQGFLEDDDSPVCYDSRRSPRRRLLPPTPASHRRSSFNFECLRRQSSQEEVPSSPIFPHRTALPLHLMQQQIMAVAGLDSSKAQKYSPSHSTRSWATPPATPPYRDWTPCYTPLIQVEQSEALDQVNGSLPSLHRSSWYTDEPDISYRTFTPASLTVPSSFRNKNSDKQRSADSLVEAVLISEGLGRYARDPKFVSATKHEIADACDLTIDEMESAASTLLNGNVRPRANGDVGPLSHRQDYELQDFGPGYSDEEPDPGRDEEDLADEMICITTL

SEQ ID NO: 289 - DNA, 4187 bp, human organism
aactcccgcctcgggacgcctcggggtcgggctccggctgcggctgctgctgcggcgcccgcgctccggtgcgtccgcctcctgtgcccgccgcggagcagtctgcggcccgccgtgcgccctcagctccttttcctgagcccgccgcgatgggagctgcgcggggatccccggccagaccccgccggttgcctctgctcagcgtcctgctgctgccgctgctgggcggtacccagacagccattgtcttcatcaagcagccgtcctcccaggatgcactgcaggggcgccgggcgctgcttcgctgtgaggttgaggctccgggcccggtacatgtgtactggctgctcgatggggcccctgtccaggacacggagcggcgtttcgcccagggcagcagcctgagctttgcagctgtggaccggctgcaggactctggcaccttccagtgtgtggctcgggatgatgtcactggagaagaagcccgcagtgccaacgcctccttcaacatcaaatggattgaggcaggtcctgtggtcctgaagcatccagcctcggaagctgagatccagccacagacccaggtcacacttcgttgccacattgatgggcaccctcggcccacctaccaatggttccgagatgggacccccctttctgatggtcagagcaaccacacagtcagcagcaaggagcggaacctgacgctccggccagctggtcctgagcatagtgggctgtattcctgctgcgcccacagtgcttttggccaggcttgcagcagccagaacttcaccttgagcattgctgatgaaagctttgccagggtggtgctggcaccccaggacgtggtagtagcgaggtatgaggaggccatgttccattgccagttctcagcccagccacccccgagcctgcagtggctctttgaggatgagactcccatcactaaccgcagtcgccccccacacctccgcagagccacagtgtttgccaacgggtctctgctgctgacccaggtccggccacgcaatgcagggatctaccgctgcattggccaggggcagaggggcccacccatcatcctggaagccacacttcacctagcagagattgaagacatgccgctatttgagccacgggtgtttacagctggcagcgaggagcgtgtgacctgccttccccccaagggtctgccagagcccagcgtgtggtgggagcacgcgggagtccggctgcccacccatggcagggtctaccagaagggccacgagctggtgttggccaatattgctgaaagtgatgctggtgtctacacctgccacgcggccaacctggctggtcagcggagacaggatgtcaacatcactgtggccactgtgccctcctggctgaagaagccccaagacagccagctggaggagggcaaacccggctacttggattgcctgacccaggccacaccaaaacctacagttgtctggtacagaaaccagatgctcatctcagaggactcacggttcgaggtcttcaagaatgggaccttgcgcatcaacagcgtggaggtgtatgatgggacatggtaccgttgtatgagcagcaccccagccggcagcatcgaggcgcaagcccgtgtccaagtgctggaaaagctcaagttcacaccaccaccccagccacagcagtgcatggagtttgacaaggaggccacggtgccctgttcagccacaggccgagagaagcccactattaagtgggaacgggcagatgggagcagcctcccagagtgggtgacagacaacgctgggaccctgcattttgcccgggtgactcgagatgacgctggcaactacacttgcattgcctccaacgggccgcagggccagattcgtgcccatgtccagctcactgtggcagtttttatcaccttcaaagtggaaccagagcgtacgactgtgtaccagggccacacagccctactgcagtgcgaggcccagggggaccccaagccgctgattcagtggaaaggcaaggaccgcatcctggaccccaccaagctgggacccaggatgcacatcttccagaatggctccctggtgatccatgacgtggcccctgaggactcaggccgctacacctgcattgcaggcaacagctgcaacatcaagcacacggaggcccccctctatgtcgtggacaagcctgtgccggaggagtcggagggccctggcagccctcccccctacaagatgatccagaccattgggttgtcggtgggtgccgctgtggcctacatcattgccgtgctgggcctcatgttctactgcaagaagcgctgcaaagccaagcggctgcagaagcagcccgagggcgaggagccagagatggaatgcctcaacggagggcctttgcagaacgggcagccctcagcagagatccaagaagaagtggccttgaccagcttgggctccggccccgcggccaccaacaaacgccacagcacaagtgataagatgcacttcccacggtctagcctgcagcccatcaccacgctggggaagagtgagtttggggaggtgttcctggcaaaggctcagggcttggaggagggagtggcagagaccctggtacttgtgaagagcctgcagacgaaggatgagcagcagcagctggacttccggagggagttggagatgtttgggaagctgaaccacgccaacgtggtgcggctcctggggctgtgccgggaggctgagccccactacatggtgctggaatatgtggatctgggagacctcaagcagttcctgaggatttccaagagcaaggatgaaaaattgaagtcacagcccctcagcaccaagcagaaggtggccctatgcacccaggtagccctgggcatggagcacctgtccaacaaccgctttgtgcataaggacttggctgcgcgtaactgcctggtcagtgcccagagacaagtgaaggtgtctgccctgggcctcagcaaggatgtgtacaacagtgagtactaccacttccgccaggcctgggtgccgctgcgctggatgtcccccgaggccatcctggagggtgacttctctaccaagtctgatgtctgggccttcggtgtgctgatgtgggaagtgtttacacatggagagatgccccatggtgggcaggcagatgatgaagtactggcagatttgcaggctgggaaggctagacttcctcagcccgagggctgcccttccaaactctatcggctgatgcagcgctgctgggccctcagccccaaggaccggccctccttcagtgagattgccagcgccctgggagacagcaccgtggacagcaagccgtgaggagggagcccgctcaggatggcctgggcaggggaggacatctctagagggaagctcacagcatgatgggcaagatccctgtcctcctgggccctgaggtgccctagtgcaacaggcattgctgaggtctgagcagggcctggcctttcctcctcttcctcaccctcatcctttgggaggctgacttggacccaaactgggcgactagggctttgagctgggcagtttcccctgccacctcttcctctatcagggacagtgtgggtgccacaggtaaccccaatttctggccttcaacttctccccttgaccgggtccaactctgccactcatctgccaactttgcctggggagggctaggcttgggatgagctgggtttgtggggagttccttaatattctcaagttctgggcacacagggttaatgagtctcttgcccactggtccacttgggggtctagaccaggattatagaggacacagcaagtgagtcctccccactctgggcttgtgcacactgacccagacccacgtcttccccacccttctctcctttcctcatcctaagtgcctggcagatgaaggagttttcaggagcttttgacactatataaaccgccctttttgtatgcaccacgggcggcttttatatgtaattgcagcgtggggtgggtgggcatgggaggtaggggtgggccctggagatgaggagggtgggccatccttaccccacacttttattgttgtcgttttttgtttgttttgtttttttgtttttgtttttgtttttacactcgctgctctcaataaataagcctttttta

SEQ ID NO: 290 - protein, 1070 aa, human organism [sequence omitted]

SEQ ID NO: 291 - DNA, 3150 bp, human organism
atggggagccggacgccagagtcccctctccacgccgtgcagctgcgctggggcccccggcgccgacccccgctsstgccgctgctgttgctgctsstgccgccgccacccagggtcgggggcttcaacttagacgcggaggccccagcagtactctcggggcccccgggctccttcttcggattctcagtggagttttaccggccgggaacagacggggtcagtgtgctggtgggagcacccaaggctaataccagccagccaggagtgctgcagggtggtgctgtctacctctgtccttggggtgccagccccacacagtgcacccccattgaatttgacagcaaaggctctcggctcctggagtcctcactgtccagctcagagggagaggagcctgtggagtacaagtccttgcagtggttcggggcaacagttcgagcccatggctcctccatcttggcatgcgctccactgtacagctggcgcacagagaaggagccactgagcgaccccgtgggcacctgctacctctccacagataacttcacccgaattctggagtatgcaccctgccgctcagatttcagctgggcagcaggacagggttactgccaaggaggcttcagtgccgagttcaccaagactggccgtgtggttttaggtggaccaggaagctatttctggcaaggccagatcctgtctgccactcaggagcagattgcagaatcttattaccccgagtacctgatcaacctggttcaggggcagctgcagactcgccaggccagttccatctatgatgacagctacctaggatactctgtggctgttggtgaattcagtggtgatgacacagaagactttgttgctggtgtgcccaaagggaacctcacttacggctatgtcaccatccttaatggctcagacattcgatccctctacaacttctcaggggaacagatggcctcctactttggctatgcagtggccgccacagacgtcaatggggacgggctggatgacttgctggtgggggcacccctgctcatggatcggacccctgacgggcggcctcaggaggtgggcagggtctacgtctacctgcagcacccagccggcatagagcccacgcccacccttaccctcactggccatgatgagtttggccgatttggcagctccttgacccccctgggggacctggaccaggatggctacaatgatgtggccatcggggctccctttggtggggagacccagcagggagtagtgtttgtatttcctgggggcccaggagggctgggctctaagccttcccaggttctgcagcccctgtgggcagccagccacaccccagacttctttggctctgcccttcgaggaggccgagacctggatggcaatggatatcctgatctgattgtggggtcctttggtgtggacaaggctgtggtatacaggggccgccccatcgtgtccgctagtgcctccctcaccatcttccccgccatgttcaacccagaggagcggagctgcagcttagaggggaaccctgtggcctgcatcaaccttagcttctgcctcaatgcttctggaaaacacgttgctgactccattggtttcacagtggaacttcagctggactggcagaagcagaagggaggggtacggcgggcactgttcctggcctccaggcaggcaaccctgacccagaccctgctcatccagaatggggctcgagaggattgcagagagatgaagatctacctcaggaacgagtcagaatttcgagacaaactctcgccgattcacatcgctctcaacttctccttggacccccaagccccagtggacagccacggcctcaggccagccctacattatcagagcaagagccggatagaggacaaggctcagatcttgctggactgtggagaagacaacatctgtgtgcctgacctgcagctggaagtgtttggggagcagaaccatgtgtacctgggtgacaagaatgccctgaacctcactttccatgcccagaatgtgggtgagggtggcgcctatgaggctgagcttcgggtcaccgcccctccagaggctgagtactcaggactcgtcagacacccagggaacttctccagcctgagctgtgactactttgccgtgaaccagagccgcctgctggtgtgtgacctgggcaaccccatgaaggcaggagccagtctgtggggtggccttcggtttacagtccctcatctccgggacactaagaaaaccatccagtttgacttccagatcctcagcaagaatctcaacaactcgcaaagcgacgtggtttcctttcggctctccgtggaggctcaggcccaggtcaccctgaacggtgtctccaagcctgaggcagtgctattcccagtaagcgactggcatccccgagaccagcctcagaaggaggaggacctgggacctgctgtccaccatgtctatgagctcatcaaccaaggccccagctccattagccagggtgtgctggaactcagctgtccccaggctctggaaggtcagcagctcctatatgtgaccagagttacgggactcaactgcaccaccaatcaccccattaacccaaagggcctggagttggatcccgagggttccctgcaccaccagcaaaaacgggaagctccaagccgcagctctgcttcctcgggacctcagatcctgaaatgcccggaggctgagtgtttcaggctgcgctgtgagctcgggcccctgcaccaacaagagagccaaagtctgcagttgcatttccgagtctgggccaagactttcttgcagcgggagcaccagccatttagcctgcagtgtgaggctgtgtacaaagccctgaagatgccctaccgaatcctgcctcggcagctgccccaaaaagagcgtcaggtggccacagctgtgcaatggaccaaggcagaaggcagctatggcgtcccactgtggatcatcatcctagccatcctgtttggcctcctgctcctaggtctactcatctacatcctctacaagcttggattcttcaaacgctccctcccatatggcaccgccatggaaaaagctcagctcaagcctccagccacctctgatgcctga

SEQ ID NO: 292 - protein, 1049 aa, human organism
MGSRTPESPLHAVQLRWGPRRRPPLLPLLLLLLPPPPRVGGFNLDAEAPAVLSGPPGSFFGFSVEFYRPGTDGVSVLVGAPKANTSQPGVLQGGAVYLCPWGASPTQCTPIEFDSKGSRLLESSLSSSEGEEPVEYKSLQWFGATVRAHGSSILACAPLYSWRTEKEPLSDPVGTCYLSTDNFTRILEYAPCRSDFSWAAGQGYCQGGFSAEFTKTGRVVLGGPGSYFWQGQILSATQEQIAESYYPEYLINLVQGQLQTRQASSIYDDSYLGYSVAVGEFSGDDTEDFVAGVPKGNLTYGYVTILNGSDIRSLYNFSGEQMASYFGYAVAATDVNGDGLDDLLVGAPLLMDRTPDGRPQEVGRVYVYLQHPAGIEPTPTLTLTGHDEFGRFGSSLTPLGDLDQDGYNDVAIGAPFGGETQQGVVFVFPGGPGGLGSKPSQVLQPLWAASHTPDFFGSALRGGRDLDGNGYPDLIVGSFGVDKAVVYRGRPIVSASASLTIFPAMFNPEERSCSLEGNPVACINLSFCLNASGKHVADSIGFTVELQLDWQKQKGGVRRALFLASRQATLTQTLLIQNGAREDCREMKIYLRNESEFRDKLSPIHIALNFSLDPQAPVDSHGLRPALHYQSKSRIEDKAQILLDCGEDNICVPDLQLEVFGEQNHVYLGDKNALNLTFHAQNVGEGGAYEAELRVTAPPEAEYSGLVRHPGNFSSLSCDYFAVNQSRLLVCDLGNPMKAGASLWGGLRFTVPHLRDTKKTIQFDFQILSKNLNNSQSDVVSFRLSVEAQAQVTLNGVSKPEAVLFPVSDWHPRDQPQKEEDLGPAVHHVYELINQGPSSISQGVLELSCPQALEGQQLLYVTRVTGLNCTTNHPINPKGLELDPEGSLHHQQKREAPSRSSASSGPQILKCPEAECFRLRCELGPLHQQESQSLQLHFRVWAKTFLQREHQPFSLQCEAVYKALKMPYRILPRQLPQKERQVATAVQWTKAEGSYGVPLWIIILAILFGLLLLGLLIYILYKLGFFKRSLPYGTAMEKAQLKPPATSDA

SEQ ID NO: 293 - DNA, 1373 bp, human organism
gggggcgccgcgcgctgaccctccctgggcaccgctggggacgatggcgctgctcgccttgctgctggtcgtggccctaccgcgggtgtggacagacgccaacctgactgcgagacaacgagatccagaggactcccagcgaacggacgagggtgacaatagagtgtggtgtcatgtttgtgagagagaaaacactttcgagtgccagaacccaaggaggtgcaaatggacagagccatactgcgttatagcggccgtgaaaatatttccacgttttttcatggttgcgaagcagtgctccgctggttgtgcagcgatggagagacccaagccagaggagaagcggtttctcctggaagagcccatgcccttcttttacctcaagtgttgtaaaattcgctactgcaatttagaggggccacctatcaactcatcagtgttcaaagaatatgctgggagcatgggtgagagctgtggtgggctgtggctggccatcctcctgctgctggcctccattgcagccggcctcagcctgtcttgagccacgggactgccacagactgagccttccggagcatggactcgctccagaccgttgtcacctgttgcattaaacttgttttctgttgattacctcttggtttgacttcccagggtcttgggatgggagagtggggatcaggtgcagttggctcttaaccctcaagggttctttaactcacattcagaggaagtccagatctcctgagtagtgattttggtgacaagtttttctctttgaaatcaaaccttgtaactcatttattgctgatggccactcttttccttgactcccctctgcctctgagggcttcagtattgatggggagggaggcctaagtaccactcatggagagtatgtgctgagatgcttccgacctttcaggtgacgcaggaacactgggggagtctgaatgattggggtgaagacatccctggagtgaaggactcctcagcatggggggcagtggggcacacgttagggctgcccccattccagtggtggaggcgctgtggatggctgcttttcctcaacctttcctaccagattccaggaggcagaagataactaattgtgttgaagaaacttagacttcacccaccagctggcacaggtgcacagattcataaattcccacacgtgtgtgttcaacatctgaaacttaggccaagtagagagcatcagggtaaatggcgttcatttctctgttaagatgcagccatccatggggagctgagaaatcagactcaaagttccaccaaaaacaaatacaaggggacttcaaaagttcacgaaaaaaaaaaaaaaaaaaaaaaaaaaaaaaaaaaaaaaa

SEQ ID NO: 294 - protein, 165 aa, human organism
MALLALLLVVALPRVWTDANLTARQRDPEDSQRTDEGDNRVWCHVCERENTFECQNPRRCKWTEPYCVIAAVKIFPRFFMVAKQCSAGCAAMERPKPEEKRFLLEEPMPFFYLKCCKIRYCNLEGPPINSSVFKEYAGSMGESCGGLWLAILLLLASIAAGLSLS

1.-18. (canceled)

19. A method of monitoring the efficacy of a therapeutic treatment of prostate cancer, the method comprising the steps of:
(i) providing a biological sample from a patient undergoing the therapeutic treatment; and
(ii) determining the level of a prostate cancer-associated polypeptide in the biological sample by contacting the biological sample with an antibody, wherein the antibody specifically binds to a polypeptide encoded by a polynucleotide that selectively hybridizes to a sequence at least 80% identical to a sequence as shown in Tables 1-16, thereby monitoring the efficacy of the therapy.

20. The method of claim 19, further comprising the step of: (iii) comparing the level of the prostate cancer-associated polypeptide to a level of the prostate cancer-associated polypeptide in a biological sample from the patient prior to, or earlier in, the therapeutic treatment.

21. The method of claim 19, wherein the patient is a human.

22.-27. (canceled)

28. An antibody that specifically binds a polypeptide which is encoded by a nucleic acid molecule having polynucleotide sequence as shown in Tables 1-16.

29. The antibody of claim 28, further conjugated to an effector component.

30. The antibody of claim 29, wherein the effector component is a fluorescent label.

31. The antibody of claim 29, wherein the effector component is a radioisotope or a cytotoxic chemical.

32. The antibody of claim 29, which is an antibody fragment.

33. The antibody of claim 29, which is a humanized antibody.

34. A method of detecting a prostate cancer cell in a biological sample from a patient, the method comprising contacting the biological sample with an antibody of claim 28.

35. The method of claim 34, wherein the antibody is further conjugated to an effector component.

36. The method of claim 35, wherein the effector component is a fluorescent label.

37.-43. (canceled)

44. A method of inhibiting proliferation of a prostate cancer-associated cell to treat prostate cancer in a patient, the method comprising the step of administering to the subject a therapeutically effective amount of a compound identified using a method that comprises the steps of:
(i) contacting the compound with a prostate cancer-associated polypeptide, the polypeptide encoded by a polynucleotide that selectively hybridizes to a sequence at least 80% identical to a sequence as shown in Tables 1-16; and
(ii) determining the functional effect of the compound upon the polypeptide.

45. The method of claim 44, wherein the compound is an antibody.

46. The method of claim 45, wherein the patient is a human.

47.-70. (canceled)

71. A method for identifying an antibody that modulates a prostate cancer-associated polypeptide, the method comprising the steps of:
(i) contacting the antibody with a prostate cancer-associated polypeptide, the polypeptide encoded by a polynucleotide that selectively hybridizes to a sequence at least 80% identical to a sequence as shown in Tables 1-16; and
(ii) determining the functional effect of the antibody upon the polypeptide.

72. The method of claim 71, wherein the polypeptide is expressed in a eukaryotic host cell or cell membrane.

73. The method of claim 71, wherein the functional effect is determined by measuring binding of the antibody to the polypeptide.

74. The method of claim 71, wherein the polypeptide is recombinant.

75. A pharmaceutical composition for treating a mammal having prostate cancer, the composition comprising the antibody of claim 28 and a physiologically acceptable excipient.
